(19) United States
(12) Patent Application Publication
(10) Pub. No.: US 2010/0215664 A1
(43) Pub. Date: Aug. 26, 2010

(54) AMINO ACID SEQUENCES DIRECTED AGAINST IL-6R AND POLYPEPTIDES COMPRISING THE SAME FOR THE TREATMENT OF DISEASES AND DISORDERS ASSOCIATED WITH IL-6 -MEDIATED SIGNALLING

(75) Inventors: Joost Alexander Kolkman, Sint-Martens-Latem (BE); Els Anna Alice Beirnaert, Bellen (BE)

Correspondence Address: WOLF GREENFIELD & SACKS, P.C., 600 ATLANTIC AVENUE, BOSTON, MA, 02210-2206, US

(73) Assignee: Ablynx N.V., Ghent-Zwijnaarde (BE)

(21) Appl. No.: 12/310,223

(22) PCT Filed: Aug. 17, 2007
(86) PCT No.: PCT/EP2007/058587

§ 371 Date: Dec. 8, 2009

Related U.S. Application Data
(60) Provisional application No. 60/838,904, filed on Aug. 18, 2006.
(60) Provisional application No. 60/873,012, filed on Dec. 5, 2006.
(60) Provisional application No. 60/938,325, filed on May 16, 2007.

(51) Int. Cl. A61K 39/395; C07K 16/18; C07H 21/04; A61P 31/00; A61P 35/00; A61P 19/10; A61P 17/06; A61P 29/00; C07K 14/00; C12P 21/06

(52) U.S. Cl. 424/158.1; 530/300; 530/387.1; 536/23.53; 530/324; 435/69.1

(57) ABSTRACT

The invention relates to amino acid sequences that are directed against and/or that can specifically bind to IL-6 receptor, compounds or constructs that comprise said amino acid sequence, nucleic acids that encode said amino acid sequences, compounds or constructs, pharmaceutical compositions comprising said amino acid sequences, compounds or constructs as well as methods for the prevention and/or treatment of diseases and disorders associated with IL-6 receptor.

[0001] The present invention relates to amino acid sequences that are directed against (as defined herein) Interleukin-6 Receptor (IL-6R), as well as to compounds or constructs, and in particular proteins and polypeptides, that comprise or essentially consist of one or more such amino acid sequences (also referred to herein as “amino acid sequences of the invention”, “compounds of the invention”, and “polypeptides of the invention”, respectively).

[0002] The invention also relates to nucleic acids encoding such amino acid sequences and polypeptides (also referred to herein as “nucleic acids of the invention” or “nucleotide sequences of the invention”); to methods for preparing such amino acid sequences and polypeptides; to host cells expressing or capable of expressing such amino acid sequences or polypeptides; to compositions, and in particular to pharmaceutical compositions, that comprise such amino acid sequences, polypeptides, nucleic acids and/or host cells; and to uses of such amino acid sequences or polypeptides, nucleic acids, host cells and/or compositions, in particular for prophylactic, therapeutic or diagnostic purposes, such as the prophylactic, therapeutic or diagnostic purposes mentioned herein.

[0003] Other aspects, embodiments, advantages and applications of the invention will become clear from the further description herein.

[0004] The interaction of IL-6, a protein originally identified as a B cell differentiation factor (Hirano et al., 1985; EP0257406), with IL-6R (Yamasaki et al., 1988; EP0325474) results in the formation of the IL-6/IL-6R complex. This complex binds to gp130 (Taga et al., 1989; EP0411946), a membrane protein on a target cell, which transmits various physiological actions of IL-6. IL-6 is currently known to be involved in—amongst others—the regulation of the immune response, hematopoiesis, the acute phase response, bone metabolism, angiogenesis, and inflammation. Deregulation of IL-6 production is implicated in the pathology of several autoimmune and chronic inflammatory proliferative disease processes (Ishihara and Hirano, 2002). As a consequence, inhibitors of IL-6 induced signaling have attracted much attention in the past (Hirano et al., 1990). Polypeptides specifically binding to IL-6 (Klein et al., 1991; EP0312996), IL-6R (EP0409607) or gp130 (Saito et al., 1993; EP0572118) proved to exhibit an efficient inhibitory effect on IL-6 functioning.

[0005] IL-6 overproduction and signalling (and in particular so-called trans-signalling) are involved in various diseases and disorders, such as sepsis (Starnes et al., 1999) and various forms of cancer such as multiple myeloma disease (MM), renal cell carcinoma (RCC), plasma cell leukaemia (Klein et al., 1991), lymphoma, B-lymphoproliferative disorder (BLPD) and prostate cancer. Non-limiting examples of other diseases caused by excessive IL-6 production or signalling include bone resorption (osteoporosis) (Roodman et al., 1992; Jilka et al., 1992), cachexia (Strassman et al., 1992), psoriasis, mesangial proliferative glomerulonephritis, Kaposi's sarcoma, AIDS-related lymphoma (Emilie et al., 1994), inflammatory diseases and disorder such as rheumatoid arthritis, systemic onset juvenile idiopathic arthritis, hypergammaglobulinemia (Grau et al., 1990); Crohn's disease, ulcerative colitis, systemic lupus erythematosus (SLE), multiple sclerosis, Castleman's disease, IgM gammopathy, cardiac myxoma, asthma (in particular allergic asthma) and autoimmune insulin-dependent diabetes mellitus (Campbell et al., 1991). Other IL-6 related disorders will be clear to the skilled person.

[0006] As can for example be seen from the references above, the prior art describes antibodies and antibody fragments directed against human IL-6, against human IL-6R and against human gp130 protein for the prevention and treatment of IL-6 relates disorders. Examples are Tocilizumab (see Woo P, et al. Arthritis Res Ther. (2005) 7: 1281-8, Nishimoto N et al. Blood. (2005) 106: 2627-32, Ito H et al. Gastroenterology. (2004) 126: 989-96, Choy E H et al. Arthritis Rheum. (2002) 46: 3143-50), BE8 (see Bataille R et al. Blood (1995) 86:685-91, Emilie D et al. Blood (1994) 84:2472-9, Beck J T et al. N Engl J. Med. (1994) 330:602-5, Wendling D et al. J Rheumatol. (1993) 20:259-62) and CNTO-328 of Centocor (see Journal of Clinical Oncology, (2004) 22/14S: 2560; Journal of Clinical Oncology, (2004) 22/14S: 2608; Int J Cancer (2004) 111:592-5). Another active principle known in the art for the prevention and treatment of IL-6 related disorders is an Fc fusion of soluble gp130 (see Becker C et al. Immunity. (2004) 21: 491-501, Doganci A et al. J Clin Invest. (2005) 115:313-25, Nowell M A et al. J. Immunol. (2003) 171: 3202-9, Atreya R et al. Nat. Med. (2000) 6:583-8.)

[0007] The amino acid sequences, polypeptides and compositions of the present invention can generally be used to modulate, and in particular inhibit and/or prevent, binding of IL-6R to IL-6 and/or binding of the IL-6/IL-6R complex to gp130 and thus to modulate, and in particular inhibit or prevent, the signalling that is mediated by IL-6R, IL-6, IL6/IL-6R complex or gp130 to modulate the biological pathways in which IL-6R, IL-6, the IL6/IL-6R complex and/or gp130 are involved, and/or to modulate the biological mechanisms, responses and effects associated with such signalling or these pathways.

[0008] In the context of the present invention “modulating the interaction between IL-6/IL-6R complex and gp130” can for example mean:
[0009] binding to IL-6R (i.e. as such or as present in the IL-6/IL-6R complex) in such a way that the formation of the IL-6/IL-6R complex is inhibited or affected (e.g. fully or partially disrupted) in such a way that the binding of the complex to—e.g. its affinity for—gp130 is reduced (or reversely, that the binding of gp 130 to—e.g. its affinity for—the complex is reduced), so that the signaling induced/mediated by the binding of the complex to gp130 is modulated (e.g. reduced);
   or
[0010] binding to IL-6R (i.e. as such or as present in the IL-6/IL-6R complex) in such a way that the formation of the IL-6/IL-6R complex essentially is not affected but that the binding of said complex to gp130 is modulated (e.g. inhibited), so that the signalling induced/mediated by the binding of the complex to gp130 is modulated (e.g. reduced);
   both compared to the formation of the complex and its binding to gp130 without the presence of the amino acid sequence or Nanobody of the invention.

[0011] Accordingly, in one specific, but non-limiting aspect, the invention provides polypeptides and compositions that are, and/or that can be used as, an antagonist of IL-6, of IL-6R, of IL-6- or IL-6R-mediated signalling, and/or of the biological pathways mechanisms, responses and/or effects in which IL-6, IL-6R and/or IL-6- or IL-6R mediated signalling are involved.

[0012] As such, the amino acid sequences, polypeptides and compositions of the invention may for example bind an epitope that lies in, forms part of, or overlaps with (i.e. in the primary or tertiary structure) or is in close proximity to (i.e. in the primary or tertiary structure) to the IL-6 binding site on IL-6R (for example, competitively with IL-6); bind an epitope that lies in, forms part of, or overlaps with (i.e. in the primary or tertiary structure) or is in close proximity to (i.e. in the primary or tertiary structure) the gp130 binding site on IL-6R (for example, competitively with gp130); and/or bind an epitope that lies in, forms part of, or overlaps with (i.e. in the primary or tertiary structure) or is in close proximity to (i.e. in the primary or tertiary structure) the gp 130 binding site on the complex (for example, competitively with gp 130). Preferably, any such epitope is an extracellular epitope. Some specific epitopes to which the amino acid sequences, Nanobodies and polypeptides of the invention may preferably bind will become clear from the further description herein.

[0013] As such, the amino acid sequences, polypeptides and compositions of the present invention can be used for the prevention and treatment of diseases and disorders associated with IL-6R, IL-6 and/or with the IL-6/IL-6R complex (optionally in further complex with gp130), and/or with the signaling pathway(s) and/or the biological functions and responses in which IL-6 and/or the IL-6/IL-6R complex (optionally in further complex with gp130) are involved, and in particular for the prevention and treatment of diseases and disorders associated with IL-6R, IL-6 and/or with the IL-6/IL-6R complex (optionally in further complex with gp130), and/or with the signaling pathway(s) and/or the biological functions and responses in which IL-6R, IL-6 and/or with the IL-6/IL-6R complex (optionally in further complex with gp130) are involved, which are characterized by excessive and/or unwanted signalling mediated by IL-6R or by the pathway(s) in which IL-6R is involved. Examples of such diseases and disorders associated with IL-6R, IL-6 and/or with the IL-6/IL-6R complex, and/or with the signaling pathway(s) and/or the biological functions and responses in which IL-6 and/or the IL-6/IL-6R complex are involved, will be clear to the skilled person based on the disclosure herein, and for example include the following diseases and disorders: sepsis (Starnes et al., 1999) and various forms of cancer such as multiple myeloma disease (MM), renal cell carcinoma (RCC), plasma cell leukaemia (Klein et al., 1991), lymphoma, B-lymphoproliferative disorder (BLPD) and prostate cancer. Non-limiting examples of other diseases caused by excessive IL-6 production or signalling include bone resorption (osteoporosis) (Roodman et al., 1992; Jilka et al., 1992), cachexia (Strassman et al., 1992), psoriasis, mesangial proliferative glomerulonephritis, Kaposi's sarcoma, AIDS-related lymphoma (Emilie et al., 1994), inflammatory diseases and disorder such as rheumatoid arthritis, systemic onset juvenile idiopathic arthritis, hypergammaglobulinemia (Grau et al., 1990); Crohn's disease, ulcerative colitis, systemic lupus erythematosus (SLE), multiple sclerosis, Castleman's disease, IgM gammopathy, cardiac myxoma, asthma (in particular allergic asthma) and autoimmune insulin-dependent diabetes mellitus (Campbell et al., 1991). Other IL-6R, IL-6 and/or IL-6/IL-6R complex related disorders will be clear to the skilled person. Such diseases and disorders are also generally referred to herein as “IL-6R related disorders”.

[0014] Thus, without being limited thereto, the amino acid sequences and polypeptides of the invention can for example be used to prevent and/or to treat all diseases and disorders that are currently being prevented or treated with active principles that can modulate IL-6R-mediated signalling, such as those mentioned in the prior art cited above. It is also envisaged that the polypeptides of the invention can be used to prevent and/or to treat all diseases and disorders for which treatment with such active principles is currently being developed, has been proposed, or will be proposed or developed in future. In addition, it is envisaged that, because of their favourable properties as further described herein, the polypeptides of the present invention may be used for the prevention and treatment of other diseases and disorders than those for which these known active principles are being used or will be proposed or developed; and/or that the polypeptides of the present invention may provide new methods and regimens for treating the diseases and disorders described herein.

[0015] Other applications and uses of the amino acid sequences and polypeptides of the invention will become clear to the skilled person from the further disclosure herein.

[0016] Generally, it is an object of the invention to provide pharmacologically active agents, as well as compositions comprising the same, that can be used in the diagnosis, prevention and/or treatment of one or more IL-6R related disorders (as defined herein); and to provide methods for the diagnosis, prevention and/or treatment of such diseases and disorders that involve the administration and/or use of such agents and compositions.

[0017] In particular, it is an object of the invention to provide such pharmacologically active agents, compositions and/or methods that have certain advantages compared to the agents, compositions and/or methods that are currently used and/or known in the art. These advantages will become clear from the further description below.

[0018] More in particular, it is an object of the invention to provide therapeutic proteins that can be used as pharmacologically active agents, as well as compositions comprising the same, for the diagnosis, prevention and/or treatment of one or more IL-6R related disorders (as defined herein); and to provide methods for the diagnosis, prevention and/or treatment of such diseases and disorders that involve the administration and/or the use of such therapeutic proteins and compositions.

[0019] Accordingly, it is a specific object of the present invention to provide amino acid sequences and polypeptides that are directed against (as defined herein) IL-6R, in particular against IL-6R from a warm-blooded animal, more in particular against IL-6R from a mammal, and especially against human IL-6R; and to provide proteins and polypeptides comprising or essentially consisting of at least one such amino acid sequence.

[0020] In particular, it is a specific object of the present invention to provide such amino acid sequences and such proteins and/or polypeptides that are suitable for prophylactic, therapeutic and/or diagnostic use in a warm-blooded animal, and in particular in a mammal, and more in particular in a human being.

[0021] More in particular, it is a specific object of the present invention to provide such amino acid sequences and such proteins and/or polypeptides that can be used for the prevention, treatment, alleviation and/or diagnosis of one or more IL-6R related disorders (as defined herein) in a warm-blooded animal, in particular in a mammal, and more in particular in a human being.

[0022] It is also a specific object of the invention to provide such amino acid sequences and such proteins and/or polypeptides that can be used in the preparation of pharmaceutical or veterinary compositions for the prevention and/or treatment of one or more IL-6R related disorders (as defined herein) in a warm-blooded animal, in particular in a mammal, and more in particular in a human being.

[0023] In the invention, generally, these objects are achieved by the use of the amino acid sequences, proteins, polypeptides and compositions that are described herein.

[0024] In general, the invention provides amino acid sequences and polypeptides that are directed against (as defined herein) and/or can specifically bind (as defined herein) to IL-6R; as well as compounds and constructs, and in particular proteins and polypeptides, that comprise at least one such amino acid sequence.

[0025] More in particular, the invention provides amino acid sequences that can bind to IL-6R with an affinity (suitably measured and/or expressed as a K_{D}-value (actual or apparent), a K_{A}-value (actual or apparent), a kₒₙ-rate and/or a k_{off}-rate, or alternatively as an IC₅₀ value, as further described herein) that is as defined herein; as well as compounds and constructs, and in particular proteins and polypeptides, that comprise at least one such amino acid sequence.

[0026] In particular, amino acid sequences and polypeptides of the invention are preferably such that they:
[0027] bind to IL-6R with a dissociation constant (K_{D}) of 10⁻⁵ to 10⁻¹² moles/liter or less, and preferably 10⁻⁷ to 10⁻¹² moles/liter or less and more preferably 10⁻⁸ to 10⁻¹² moles/liter (i.e. with an association constant (K_{A}) of 10⁵ to 10¹² liter/moles or more, and preferably 10⁷ to 10¹² liter/moles or more and more preferably 10⁸ to 10¹² liter/moles);
   and/or such that they:
[0028] bind to IL-6R with a kₒₙ-rate of between 10² M⁻¹s⁻¹ to about 10⁷ M⁻¹s⁻¹, preferably between 10³ M⁻¹s⁻¹ and 10⁷ M⁻¹s⁻¹, more preferably between 10⁴ and 10⁷ M⁻¹s⁻¹, such as between 10⁵ M⁻¹s⁻¹ and 10⁷ M⁻¹s⁻¹;
   and/or such that they:
[0029] bind to IL-6R with a k_{off} rate between 1 s⁻¹ (t_{1/2}=0.69 s) and 10⁻⁶ s⁻¹ (providing a near irreversible complex with at t_{1/2} of multiple days), preferably between 10⁻² s⁻¹ and 10⁻⁶ s⁻¹, more preferably between 10⁻³ s⁻¹ and 10⁻⁶ s⁻¹, such as between 10⁻⁴ s⁻¹ and 10⁻⁶ s⁻¹.

[0030] Preferably, a monovalent amino acid sequence of the invention (or a polypeptide that contains only one amino acid sequence of the invention) is preferably such that it will bind to IL-6R with an affinity less than 500 nM, preferably less than 200 nM, more preferably less than 10 nM, such as less than 500 pM.

[0031] Some preferred IC50 values for binding of the amino acid sequences or polypeptides of the invention to IL-6R will become clear from the further description and examples herein.

[0032] For binding to IL-6R, an amino acid sequence of the invention will usually contain within its amino acid sequence one or more amino acid residues or one or more stretches of amino acid residues (i.e. with each “stretch” comprising two or amino acid residues that are adjacent to each other or in close proximity to each other, i.e. in the primary or tertiary structure of the amino acid sequence) via which the amino acid sequence of the invention can bind to IL-6R, which amino acid residues or stretches of amino acid residues thus form the “site” for binding to IL-6R (also referred to herein as the “antigen binding site”).

[0033] The amino acid sequences provided by the invention are preferably in essentially isolated form (as defined herein), or form part of a protein or polypeptide of the invention (as defined herein), which may comprise or essentially consist of one or more amino acid sequences of the invention and which may optionally further comprise one or more further amino acid sequences (all optionally linked via one or more suitable linkers). For example, and without limitation, the one or more amino acid sequences of the invention may be used as a binding unit in such a protein or polypeptide, which may optionally contain one or more further amino acid sequences that can serve as a binding unit (i.e. against one or more other targets than IL-6R), so as to provide a monovalent, multivalent or multispecific polypeptide of the invention, respectively, all as described herein. Such a protein or polypeptide may also be in essentially isolated form (as defined herein).

[0034] Generally, when an amino acid sequence of the invention (or a compound, construct or polypeptide comprising the same) is intended for administration to a subject (for example for therapeutic and/or diagnostic purposes as described herein), it is preferably either an amino acid sequence that does not occur naturally in said subject; or, when it does occur naturally in said subject, in essentially isolated form (as defined herein).

[0035] It will also be clear to the skilled person that for pharmaceutical use, the amino acid sequences of the invention (as well as compounds, constructs and polypeptides comprising the same) are preferably directed against human IL-6R; whereas for veterinary purposes, the amino acid sequences and polypeptides of the invention are preferably directed against IL-6R from the species to be treated, or at least cross-reactive with IL-6R from the species to be treated.

[0036] Furthermore, an amino acid sequence of the invention (or compound, construct or polypeptide comprising one or more such amino acid sequences) may optionally, and in addition to the at least one binding site for binding against IL-6R, contain one or more further binding sites for binding against other antigens, proteins or targets.

[0037] The efficacy of the amino acid sequences and polypeptides of the invention, and of compositions comprising the same, can be tested using any suitable in vitro assay, cell-based assay, in vivo assay and/or animal model known per se, or any combination thereof, depending on the specific disease or disorder involved. Suitable assays and animal models will be clear to the skilled person, and for example include proliferation assays using IL6-dependent cell lines including B9, XG1 and 7TD1, collagen induced arthritis model, transplant model of synovial tissue in SCID mice, xenograft models of various human cancers, including lymphoma, myeloma, prostate cancer and renal cell carcinoma, IBD models including TNBS, DSS and IL10 knockout models, as well as the assays and animal models used in the experimental part below and in the prior art cited herein (Peake et al., Rheumatology 2006; 45(12):1485-9; Wahid et al.; Clin Exp Immunol. 2000, 122:133-142; Matsuno et al., Arthritis and rheumatism, 1998, 41: 2014-2021).

[0038] Also, according to the invention, amino acid sequences and polypeptides that are directed against IL-6R from a first species of warm-blooded animal may or may not show cross-reactivity with IL-6R from one or more other species of warm-blooded animal, by which is meant that these amino acid sequences are also “directed against” (as defined herein) and/or are capable of specific binding to (as defined herein) IL-6R from said warm-blooded animal. For example, amino acid sequences and polypeptides directed against human IL-6R may or may not show cross reactivity with IL-6R from one or more other species of primates (such as, without limitation, monkeys from the genus Macaca (such as, and in particular, cynomologus monkeys (Macaca fascicularis) and/or rhesus monkeys (Macaca mulatta)) and baboon (Papio ursinus)) and/or with IL-6R from one or more species of animals that are often used in animal models for diseases (for example mouse, rat, rabbit, pig or dog), and in particular in animal models for diseases and disorders associated with IL-6R (such as the species and animal models mentioned herein). In this respect, it will be clear to the skilled person that such cross-reactivity, when present, may have advantages from a drug development point of view, since it allows the amino acid sequences and polypeptides against human IL-6R to be tested in such disease models. In a preferred but non-limiting aspect, the amino acid sequences of the invention (as well as compounds, constructs and polypeptides comprising the same) may be cross-reactive with the amino acid sequence for IL-6R from Macaca fascicularis that is given in SEQ ID NO: 633. For this sequence and the corresponding cDNA sequence, reference is also made to the non-prepublished US provisional application filed by Ablynx N.V. on Jul. 19, 2007 entitled “Receptor for interleukin-6 (IL-6) from Macaca fascicularis”; see SEQ ID NO: 3 and FIG. 1B for the cDNA sequence and SEQ ID NO: 4 and FIG. 3B for the amino acid sequence.

[0039] More generally, amino acid sequences and polypeptides of the invention that are cross-reactive with IL-6R from multiple species of mammal will usually be advantageous for use in veterinary applications, since it will allow the same amino acid sequence or polypeptide to be used across multiple species. Thus, it is also encompassed within the scope of the invention that amino acid sequences and polypeptides directed against IL-6R from one species of animal (such as amino acid sequences and polypeptides against human IL-6R) can be used in the treatment of another species of animal, as long as the use of the amino acid sequences and/or polypeptides provide the desired effects in the species to be treated.

[0040] The present invention is in its broadest sense also not particularly limited to or defined by a specific antigenic determinant, epitope, part, domain, subunit or confirmation (where applicable) of IL-6R against which the amino acid sequences and polypeptides of the invention are directed. However, it is generally assumed and preferred that the amino acid sequences and polypeptides of the invention are preferably directed against any epitope of the IL-6 receptor involved in the interaction of the IL-6 receptor with IL-6.

[0041] Such epitopes or interaction sites have been described in detail in Boulanger et al. (2003) (Science 300, 2101-2104) and reference is specifically made to FIG. 2 in cited reference. More preferably, the amino acid sequences and polypeptides of the present invention are directed against an extracellular domain of the IL-6 receptor. Still more preferably, the amino acid sequences and polypeptides of the present invention are directed against the extracellular D3 domain of the IL-6 receptor. Still more preferably, the amino acid sequences and polypeptides of the present invention interact with one or more of the 18 contact residues as described in Boulanger et al. 2003 (Science 300, 2101-2104) present in the extracellular D3 domain of the IL-6 receptor that contribute to the interaction of the IL-6 receptor with IL-6. Most preferably, the amino acid sequences and polypeptides of the present invention interact with amino acid residues Phe229 and Phe279 present in the extracellular D3 domain of the IL-6 receptor.

[0042] Thus, in one preferred, but non-limiting aspect, the amino acid sequences and polypeptides of the invention are directed against any epitope of the IL-6 receptor involved in the interaction of the IL-6 receptor with IL-6, and are as further defined herein.

[0043] Alternatively, the amino acid sequences and polypeptides of the invention are directed against any epitope of the IL-6 receptor involved in the interaction of the IL-6 receptor with gp130. Such epitopes or interaction sites have been described in detail in Boulanger et al. (2003) (Science 300, 2101-2104) and reference is specifically made to FIG. 2 in cited reference.

[0044] In this context, according to a non-limiting aspect, amino acid sequences and polypeptides of the invention are preferably such that they can compete for binding to the IL-6 receptor with the commercially available human-mouse reconstituted chimeric monoclonal anti-IL6R antibody Tocilizumab (MRA) (Chugai/Roche) or an antigen binding fragment thereof (see for example WO 92/19759 and corresponding European patent EP 0628639, as well as Shinkura et al., 1998, Anticancer Research 18, 1217-1222), for example in the assay described in Example 29; and/or such that they can bind to the same epitope or binding site on IL-6R as Tocilizumab, or to an epitope close to said binding site and/or overlapping with said binding site.

[0045] Also, according to a non-limiting aspect, amino acid sequences and polypeptides of the invention are preferably such that they can compete for binding to the IL-6 receptor with the reference IgG and/or reference Fab according to patent EP 0628639; and/or such that they can bind to the same epitope or binding site on IL-6R as said reference IgG or reference Fab, or to an epitope close to said binding site and/or overlapping with said binding site. For the preparation and sequence of said reference IgG and reference Fab, reference is made to Reference Example 1 below, as well as to SEQ ID NO's: 629 to 632.

[0046] Thus, generally and without limitation, amino acid sequences and polypeptides of the invention may be directed against any epitope of the IL-6 receptor involved in the interaction of the IL-6 receptor with IL-6 and/or gp130.

[0047] The amino acid sequences and polypeptides of the invention are also preferably (but without limitation) such that they effect a decrease (i.e. by at least 1 percent such as by at least 10 percent or more) in the levels of C-reactive protein (CRP) in a mammal (such as a human subject or in a suitable animal model for inflammation such as the cynomolgus monkey model used in the experimental part below) when they are administered to said mammal in a therapeutically relevant amount.

[0048] It is also within the scope of the invention that, where applicable, an amino acid sequence or polypeptide of the invention can bind to two or more antigenic determinants, epitopes, parts, domains, subunits or confirmations of IL-6R. In such a case, the antigenic determinants, epitopes, parts, domains or subunits of IL-6R to which the amino acid sequences and/or polypeptides of the invention bind may be essentially the same (for example, if IL-6R contains repeated structural motifs or occurs in a multimeric form) or may be different (and in the latter case, the amino acid sequences and polypeptides of the invention may bind to such different antigenic determinants, epitopes, parts, domains, subunits of IL-6R with an affinity and/or specificity which may be the same or different). Also, for example,

[0049] when IL-6R exists in an activated conformation and in an inactive conformation, the amino acid sequences and polypeptides of the invention may bind to either one of these confirmation, or may bind to both these confirmations (i.e. with an affinity and/or specificity which may be the same or different). Also, for example, the amino acid sequences and polypeptides of the invention may bind to a conformation of IL-6R in which it is bound to a pertinent ligand, may bind to a conformation of IL-6R in which it not bound to a pertinent ligand, or may bind to both such conformations (again with an affinity and/or specificity which may be the same or different).

[0050] It is also expected that the amino acid sequences and polypeptides of the invention will generally bind to all naturally occurring or synthetic analogs, variants, mutants, alleles, parts and fragments of IL-6R; or at least to those analogs, variants, mutants, alleles, parts and fragments of IL-6R that contain one or more antigenic determinants or epitopes that are essentially the same as the antigenic determinant(s) or epitope(s) to which the amino acid sequences and polypeptides of the invention bind in IL-6R (e.g. in wild-type IL-6R). Again, in such a case, the amino acid sequences and polypeptides of the invention may bind to such analogs, variants, mutants, alleles, parts and fragments with an affinity and/or specificity that are the same as, or that are different from (i.e. higher than or lower than), the affinity and specificity with which the amino acid sequences of the invention bind to (wild-type) IL-6R. It is also included within the scope of the invention that the amino acid sequences and polypeptides of the invention bind to some analogs, variants, mutants, alleles, parts and fragments of IL-6R, but not to others.

[0051] When IL-6R exists in a monomeric form and in one or more multimeric forms, it is within the scope of the invention that the amino acid sequences and polypeptides of the invention only bind to IL-6R in monomeric form, only bind to IL-6R in multimeric form, or bind to both the monomeric and the multimeric form. Again, in such a case, the amino acid sequences and polypeptides of the invention may bind to the monomeric form with an affinity and/or specificity that are the same as, or that are different from (i.e. higher than or lower than), the affinity and specificity with which the amino acid sequences of the invention bind to the multimeric form.

[0052] Also, when IL-6R can associate with other proteins or polypeptides to form protein complexes (e.g. with multiple subunits), it is within the scope of the invention that the amino acid sequences and polypeptides of the invention bind to IL-6R in its non-associated state, bind to IL-6R in its associated state, or bind to both. In all these cases, the amino acid sequences and polypeptides of the invention may bind to such multimers or associated protein complexes with an affinity and/or specificity that may be the same as or different from (i.e. higher than or lower than) the affinity and/or specificity with which the amino acid sequences and polypeptides of the invention bind to IL-6R in its monomeric and non-associated state.

[0053] Also, as will be clear to the skilled person, proteins or polypeptides that contain two or more amino acid sequences directed against IL-6R may bind with higher avidity to IL-6R than the corresponding monomeric amino acid sequence(s). For example, and without limitation, proteins or polypeptides that contain two or more amino acid sequences directed against different epitopes of IL-6R may (and usually will) bind with higher avidity than each of the different monomers, and proteins or polypeptides that contain two or more amino acid sequences directed against IL-6R may (and usually will) bind also with higher avidity to a multimer of IL-6R.

[0054] Generally, amino acid sequences and polypeptides of the invention will at least bind to those forms of IL-6R (including monomeric, multimeric and associated forms) that are the most relevant from a biological and/or therapeutic point of view, as will be clear to the skilled person.

[0055] It is also within the scope of the invention to use parts, fragments, analogs, mutants, variants, alleles and/or derivatives of the amino acid sequences and polypeptides of the invention, and/or to use proteins or polypeptides comprising or essentially consisting of one or more of such parts, fragments, analogs, mutants, variants, alleles and/or derivatives, as long as these are suitable for the uses envisaged herein. Such parts, fragments, analogs, mutants, variants, alleles and/or derivatives will usually contain (at least part of) a functional antigen-binding site for binding against IL-6R; and more preferably will be capable of specific binding to IL-6R, and even more preferably capable of binding to IL-6R with an affinity (suitably measured and/or expressed as a K_{D}-value (actual or apparent), a K_{A}-value (actual or apparent), a kₒₙ-rate and/or a kₐ-rate, or alternatively as an IC₅₀ value, as further described herein) that is as defined herein. Some non-limiting examples of such parts, fragments, analogs, mutants, variants, alleles, derivatives, proteins and/or polypeptides will become clear from the further description herein. Additional fragments or polypeptides of the invention may also be provided by suitably combining (i.e. by linking or genetic fusion) one or more (smaller) parts or fragments as described herein.

[0056] In one specific, but non-limiting aspect of the invention, which will be further described herein, such analogs, mutants, variants, alleles, derivatives have an increased half-life in serum (as further described herein) compared to the amino acid sequence from which they have been derived. For example, an amino acid sequence of the invention may be linked (chemically or otherwise) to one or more groups or moieties that extend the half-life (such as PEG), so as to provide a derivative of an amino acid sequence of the invention with increased half-life.

[0057] In one specific, but non-limiting aspect, the amino acid sequence of the invention may be an amino acid sequence that comprises an immunoglobulin fold or may be an amino acid sequence that, under suitable conditions (such as physiological conditions) is capable of forming an immunoglobulin fold (i.e. by folding). Reference is inter alia made to the review by Halaby et al., J. (1999) Protein Eng. 12, 563-71. Preferably, when properly folded so as to form an immunoglobulin fold, such an amino acid sequence is capable of specific binding (as defined herein) to IL-6R; and more preferably capable of binding to IL-6R with an affinity (suitably measured and/or expressed as a K_{D}-value (actual or apparent), a K_{A}-value (actual or apparent), a kₒₙ-rate and/or a k_{off}-rate, or alternatively as an IC₅₀ value, as further described herein) that is as defined herein. Also, parts, fragments, analogs, mutants, variants, alleles and/or derivatives of such amino acid sequences are preferably such that they comprise an immunoglobulin fold or are capable for forming, under suitable conditions, an immunoglobulin fold.

[0058] In particular, but without limitation, the amino acid sequences of the invention may be amino acid sequences that essentially consist of 4 framework regions (FR1 to FR4 respectively) and 3 complementarity determining regions (CDR1 to CDR3 respectively); or any suitable fragment of such an amino acid sequence (which will then usually contain at least some of the amino acid residues that form at least one of the CDR's, as further described herein).

[0059] The amino acid sequences of the invention may in particular be an immunoglobulin sequence or a suitable fragment thereof, and more in particular be an immunoglobulin variable domain sequence or a suitable fragment thereof, such as light chain variable domain sequence (e.g. a V_{L}-sequence) or a suitable fragment thereof; or a heavy chain variable domain sequence (e.g. a V_{H}-sequence) or a suitable fragment thereof. When the amino acid sequence of the invention is a heavy chain variable domain sequence, it may be a heavy chain variable domain sequence that is derived from a conventional four-chain antibody (such as, without limitation, a V_{H} sequence that is derived from a human antibody) or be a so-called V_{HH}-sequence (as defined herein) that is derived from a so-called “heavy chain antibody” (as defined herein).

[0060] However, it should be noted that the invention is not limited as to the origin of the amino acid sequence of the invention (or of the nucleotide sequence of the invention used to express it), nor as to the way that the amino acid sequence or nucleotide sequence of the invention is (or has been) generated or obtained. Thus, the amino acid sequences of the invention may be naturally occurring amino acid sequences (from any suitable species) or synthetic or semi-synthetic amino acid sequences. In a specific but non-limiting aspect of the invention, the amino acid sequence is a naturally occurring immunoglobulin sequence (from any suitable species) or a synthetic or semi-synthetic immunoglobulin sequence, including but not limited to “humanized” (as defined herein) immunoglobulin sequences (such as partially or fully humanized mouse or rabbit immunoglobulin sequences, and in particular partially or fully humanized V_{HH} sequences or Nanobodies), “camelized” (as defined herein) immunoglobulin sequences, as well as immunoglobulin sequences that have been obtained by techniques such as affinity maturation (for example, starting from synthetic, random or naturally occurring immunoglobulin sequences), CDR grafting, veneering, combining fragments derived from different immunoglobulin sequences, PCR assembly using overlapping primers, and similar techniques for engineering immunoglobulin sequences well known to the skilled person; or any suitable combination of any of the foregoing. Reference is for example made to the standard handbooks, as well as to the further description and prior art mentioned herein.

[0061] Similarly, the nucleotide sequences of the invention may be naturally occurring nucleotide sequences or synthetic or semi-synthetic sequences, and may for example be sequences that are isolated by PCR from a suitable naturally occurring template (e.g. DNA or RNA isolated from a cell), nucleotide sequences that have been isolated from a library (and in particular, an expression library), nucleotide sequences that have been prepared by introducing mutations into a naturally occurring nucleotide sequence (using any suitable technique known per se, such as mismatch PCR), nucleotide sequence that have been prepared by PCR using overlapping primers, or nucleotide sequences that have been prepared using techniques for DNA synthesis known per se.

[0062] The amino acid sequence of the invention may in particular be a domain antibody (or an amino acid sequence that is suitable for use as a domain antibody), a single domain antibody (or an amino acid sequence that is suitable for use as a single domain antibody), a “dAb” (or an amino acid sequence that is suitable for use as a dAb) or a Nanobody® (as defined herein, and including but not limited to a V_{HH} sequence); other single variable domains, or any suitable fragment of any one thereof. For a general description of (single) domain antibodies, reference is also made to the prior art cited above, as well as to EP 0 368 684. For the term “dAb's”, reference is for example made to Ward et al. (Nature 1989 Oct. 12; 341 (6242): 544-6), to Holt et al., Trends Biotechnol., 2003, 21(10:484-490; as well as to for example WO 06/030220, WO 06/003388 and other published patent applications of Domantis Ltd. It should also be noted that, although less preferred in the context of the present invention because they are not of mammalian origin, single domain antibodies or single variable domains can be derived from certain species of shark (for example, the so-called “IgNAR domains”, see for example WO 05/18629).

[0063] In particular, the amino acid sequence of the invention may be a Nanobody® (as defined herein) or a suitable fragment thereof. [Note: Nanobody®, Nanobodies® and Nanoclone® are registered trademarks of Ablynx N.V.] Such Nanobodies directed against IL-6R will also be referred to herein as “Nanobodies of the invention”.

[0064] For a general description of Nanobodies, reference is made to the further description below, as well as to the prior art cited herein. In this respect, it should however be noted that this description and the prior art mainly described Nanobodies of the so-called “V_{H}3 class” (i.e. Nanobodies with a high degree of sequence homology to human germline sequences of the V_{H}3 class such as DP-47, DP-51 or DP-29), which Nanobodies form a preferred aspect of this invention. It should however be noted that the invention in its broadest sense generally covers any type of Nanobody directed against IL-6R, and for example also covers the Nanobodies belonging to the so-called “V_{H}4 class” (i.e. Nanobodies with a high degree of sequence homology to human germline sequences of the V_{H}4 class such as DP-78), as for example described in the U.S. provisional application 60/792,279 by Ablynx N.V. entitled “DP-78-like Nanobodies” filed on Apr. 14, 2006.

[0065] Generally, Nanobodies (in particular V_{HH} sequences and partially humanized Nanobodies) can in particular be characterized by the presence of one or more “Hallmark residues” (as described herein) in one or more of the framework sequences (again as further described herein).

[0066] Thus, generally, a Nanobody can be defined as an amino acid sequence with the (general) structure

[0067] FR1-CDR1-FR2-CDR2-FR3-CDR3-FR4

[0068] in which FR1 to FR4 refer to framework regions 1 to 4, respectively, and in which CDR1 to CDR3 refer to the complementarity determining regions 1 to 3, respectively, and in which one or more of the Hallmark residues are as further defined herein.

[0069] In particular, a Nanobody can be an amino acid sequence with the (general) structure

[0070] FR1-CDR1-FR2-CDR2-FR3-CDR3-FR4

[0071] in which FR1 to FR4 refer to framework regions 1 to 4, respectively, and in which CDR1 to CDR3 refer to the complementarity determining regions 1 to 3, respectively, and in which the framework sequences are as further defined herein.

[0072] Thus, the invention also relates to such Nanobodies that can bind to (as defined herein) and/or are directed against IL-6R, to suitable fragments thereof, as well as to polypeptides that comprise or essentially consist of one or more of such Nanobodies and/or suitable fragments.

[0073] SEQ ID NO's 399 to 471 give the amino acid sequences of a number of V_{HH} sequences that have been raised against IL-6R.

[0074] Accordingly, some particularly preferred Nanobodies of the invention are Nanobodies which can bind (as further defined herein) to and/or are directed against to IL-6R and which:
[0075] a) have 80% amino acid identity with at least one of the amino acid sequences of SEQ ID NO's: 399 to 471, in which for the purposes of determining the degree of amino acid identity, the amino acid residues that form the CDR sequences are disregarded. In this respect, reference is also made to Table A-1, which lists the framework 1 sequences (SEQ ID NO's: 42 to 92), framework 2 sequences (SEQ ID NO's: 144 to 194), framework 3 sequences (SEQ ID NO's: 246 to 296) and framework 4 sequences (SEQ ID NO's: 348 to 398) of the Nanobodies of SEQ ID NO's: 399 to 471 (with respect to the amino acid residues at positions 1 to 4 and 27 to 30 of the framework 1 sequences, reference is also made to the comments made below. Thus, for determining the degree of amino acid identity, these residues are preferably disregarded);
   and in which:
[0076] b) preferably one or more of the amino acid residues at positions 11, 37, 44, 45, 47, 83, 84, 103, 104 and 108 according to the Kabat numbering are chosen from the Hallmark residues mentioned in Table A-3 below (it being understood that V_{HH} sequences will contain one or more Hallmark residues; and that partially humanized Nanobodies will usually, and preferably, [still] contain one or more Hallmark residues [although it is also within the scope of the invention to provide—where suitable in accordance with the invention—partially humanized Nanobodies in which all Hallmark residues, but not one or more of the other amino acid residues, have been humanized]; and that in fully humanized Nanobodies, where suitable in accordance with the invention, all amino acid residues at the positions of the Hallmark residues will be amino acid residues that occur in a human V_{H}3 sequence. As will be clear to the skilled person based on the disclosure herein that such V_{HH} sequences, such partially humanized Nanobodies with at least one Hallmark residue, such partially humanized Nanobodies without Hallmark residues and such fully humanized Nanobodies all form aspects of this invention). In these Nanobodies, the CDR sequences are generally as further defined herein.

[0077] Again, such Nanobodies may be derived in any suitable manner and from any suitable source, and may for example be naturally occurring V_{HH} sequences (i.e. from a suitable species of Camelid) or synthetic or semi-synthetic amino acid sequences, including but not limited to “humanized” (as defined herein) Nanobodies, “camelized” (as defined herein) immunoglobulin sequences (and in particular camelized heavy chain variable domain sequences), as well as Nanobodies that have been obtained by techniques such as affinity maturation (for example, starting from synthetic, random or naturally occurring immunoglobulin sequences), CDR grafting, veneering, combining fragments derived from different immunoglobulin sequences, PCR assembly using overlapping primers, and similar techniques for engineering immunoglobulin sequences well known to the skilled person; or any suitable combination of any of the foregoing as further described herein. Also, when a Nanobody comprises a V_{HH} sequence, said Nanobody may be suitably humanized, as further described herein, so as to provide one or more further (partially or fully) humanized Nanobodies of the invention. Similarly, when a Nanobody comprises a synthetic or semi-synthetic sequence (such as a partially humanized sequence), said Nanobody may optionally be further suitably humanized, again as described herein, again so as to provide one or more further (partially or fully) humanized Nanobodies of the invention.

[0078] In particular, humanized Nanobodies may be amino acid sequences that are as generally defined for Nanobodies in the previous paragraphs, but in which at least one amino acid residue is present (and in particular, in at least one of the framework residues) that is and/or that corresponds to a humanizing substitution (as defined herein). Some preferred, but non-limiting humanizing substitutions (and suitable combinations thereof) will become clear to the skilled person based on the disclosure herein. In addition, or alternatively, other potentially useful humanizing substitutions can be ascertained by comparing the sequence of the framework regions of a naturally occurring V_{HH} sequence with the corresponding framework sequence of one or more closely related human V_{H} sequences, after which one or more of the potentially useful humanizing substitutions (or combinations thereof) thus determined can be introduced into said V_{HH} sequence (in any manner known per se, as further described herein) and the resulting humanized V_{HH} sequences can be tested for affinity for the target, for stability, for ease and level of expression, and/or for other desired properties. In this way, by means of a limited degree of trial and error, other suitable humanizing substitutions (or suitable combinations thereof) can be determined by the skilled person based on the disclosure herein. Also, based on the foregoing, (the framework regions of) a Nanobody may be partially humanized or fully humanized.

[0079] Some particularly preferred humanized Nanobodies of the invention are humanized variants of the Nanobodies of SEQ ID NO's: 399 to 471.

[0080] Thus, some other preferred Nanobodies of the invention are Nanobodies which can bind (as further defined herein) to IL-6R and which:
[0081] a) are a humanized variant of one of the amino acid sequences of SEQ ID NO's: 399 to 471; and/or
[0082] b) have 80% amino acid identity with at least one of the amino acid sequences of SEQ ID NO's: 399 to 471, in which for the purposes of determining the degree of amino acid identity, the amino acid residues that form the CDR sequences are disregarded;
   and in which:
[0083] c) preferably one or more of the amino acid residues at positions 11, 37, 44, 45, 47, 83, 84, 103, 104 and 108 according to the Kabat numbering are chosen from the Hallmark residues mentioned in Table A-3 below

[0084] Some preferred, but non-limiting examples of humanized Nanobodies of the Invention are given in SEQ ID NO's: 609 to 628.

[0085] According to another specific aspect of the invention, the invention provides a number of stretches of amino acid residues (i.e. small peptides) that are particularly suited for binding to IL-6R. These stretches of amino acid residues may be present in, and/or may be incorporated into, an amino acid sequence of the invention, in particular in such a way that they form (part of) the antigen binding site of an amino acid sequence of the invention. As these stretches of amino acid residues were first generated as CDR sequences of heavy chain antibodies or V_{HH} sequences that were raised against IL-6R (or may be based on and/or derived from such CDR sequences, as further described herein), they will also generally be referred to herein as “CDR sequences” (i.e. as CDR1 sequences, CDR2 sequences and CDR3 sequences, respectively). It should however be noted that the invention in its broadest sense is not limited to a specific structural role or function that these stretches of amino acid residues may have in an amino acid sequence of the invention, as long as these stretches of amino acid residues allow the amino acid sequence of the invention to bind to IL-6R. Thus, generally, the invention in its broadest sense comprises any amino acid sequence that is capable of binding to IL-6R and that comprises one or more CDR sequences as described herein and, and in particular a suitable combination of two or more such CDR sequences, that are suitably linked to each other via one or more further amino acid sequences, such that the entire amino acid sequence forms a binding domain and/or binding unit that is capable of binding to IL-6R. It should however also be noted that the presence of only one such CDR sequence in an amino acid sequence of the invention may by itself already be sufficient to provide an amino acid sequence of the invention that is capable of binding to IL-6R; reference is for example again made to the so-called “Expedite fragments” described in WO 03/050531.

[0086] Thus, in another specific, but non-limiting aspect, the amino acid sequence of the invention may be an amino acid sequence that comprises at least one amino acid sequence that is chosen from the group consisting of the CDR1 sequences, CDR2 sequences and CDR3 sequences that are described herein (or any suitable combination thereof). In particular, an amino acid sequence of the invention may be an amino acid sequence that comprises at least one antigen binding site, wherein said antigen binding site comprises at least one amino acid sequence that is chosen from the group consisting of the CDR1 sequences, CDR2 sequences and CDR3 sequences that are described herein (or any suitable combination thereof).

[0087] Generally, in this aspect of the invention, the amino acid sequence of the invention may be any amino acid sequence that comprises at least one stretch of amino acid residues, in which said stretch of amino acid residues has an amino acid sequence that corresponds to the sequence of at least one of the CDR sequences described herein. Such an amino acid sequence may or may not comprise an immunoglobulin fold. For example, and without limitation, such an amino acid sequence may be a suitable fragment of an immunoglobulin sequence that comprises at least one such CDR sequence, but that is not large enough to form a (complete) immunoglobulin fold (reference is for example again made to the “Expedite fragments” described in WO 03/050531). Alternatively, such an amino acid sequence may be a suitable “protein scaffold” that comprises least one stretch of amino acid residues that corresponds to such a CDR sequence (i.e. as part of its antigen binding site). Suitable scaffolds for presenting amino acid sequences will be clear to the skilled person, and for example comprise, without limitation, to binding scaffolds based on or derived from immunoglobulins (i.e. other than the immunoglobulin sequences already described herein), protein scaffolds derived from protein A domains (such as Affibodies™), tendamistat, fibronectin, lipocalin, CTLA-4, T-cell receptors, designed ankyrin repeats, avimers and PDZ domains (Binz et al, Nat. Biotech 2005, Vol 23:1257), and binding moieties based on DNA or RNA including but not limited to DNA or RNA aptamers (Ulrich et al._Comb Chem High Throughput Screen 2006 9(8):619-32).

[0088] Again, any amino acid sequence of the invention that comprises one or more of these CDR sequences is preferably such that it can specifically bind (as defined herein) to IL-6R, and more in particular such that it can bind to IL-6R with an affinity (suitably measured and/or expressed as a K_{D}-value (actual or apparent), a K_{A}-value (actual or apparent), a kₒₙ-rate and/or a k_{off}-rate, or alternatively as an IC₅₀ value, as further described herein), that is as defined herein.

[0089] More in particular, the amino acid sequences according to this aspect of the invention may be any amino acid sequence that comprises at least one antigen binding site, wherein said antigen binding site comprises at least two amino acid sequences that are chosen from the group consisting of the CDR1 sequences described herein, the CDR2 sequences described herein and the CDR3 sequences described herein, such that (i) when the first amino acid sequence is chosen from the CDR 1 sequences described herein, the second amino acid sequence is chosen from the CDR2 sequences described herein or the CDR3 sequences described herein; (ii) when the first amino acid sequence is chosen from the CDR2 sequences described herein, the second amino acid sequence is chosen from the CDR1 sequences described herein or the CDR3 sequences described herein; or (iii) when the first amino acid sequence is chosen from the CDR3 sequences described herein, the second amino acid sequence is chosen from the CDR1 sequences described herein or the CDR3 sequences described herein.

[0090] Even more in particular, the amino acid sequences of the invention may be amino acid sequences that comprise at least one antigen binding site, wherein said antigen binding site comprises at least three amino acid sequences that are chosen from the group consisting of the CDR1 sequences described herein, the CDR2 sequences described herein and the CDR3 sequences described herein, such that the first amino acid sequence is chosen from the CDR1 sequences described herein, the second amino acid sequence is chosen from the CDR2 sequences described herein, and the third amino acid sequence is chosen from the CDR3 sequences described herein. Preferred combinations of CDR1, CDR2 and CDR3 sequences will become clear from the further description herein. As will be clear to the skilled person, such an amino acid sequence is preferably an immunoglobulin sequence (as further described herein), but it may for example also be any other amino acid sequence that comprises a suitable scaffold for presenting said CDR sequences.

[0091] Thus, in one specific, but non-limiting aspect, the invention relates to an amino acid sequence directed against IL-6R, that comprises one or more stretches of amino acid residues chosen from the group consisting of:
[0092] a) the amino acid sequences of SEQ ID NO's: 93 to 143;
[0093] b) amino acid sequences that have at least 80% amino acid identity with at least one of the amino acid sequences of SEQ ID NO's: 93 to 143;
[0094] c) amino acid sequences that have 3, 2, or 1 amino acid difference with at least one of the amino acid sequences of SEQ ID NO's: 93 to 143;
[0095] d) the amino acid sequences of SEQ ID NO's: 195 to 245;
[0096] e) amino acid sequences that have at least 80% amino acid identity with at least one of the amino acid sequences of SEQ ID NO's: SEQ ID NO's: 195 to 245;
[0097] f) amino acid sequences that have 3, 2, or 1 amino acid difference with at least one of the amino acid sequences of SEQ ID NO's: 195 to 245;
[0098] g) the amino acid sequences of SEQ ID NO's: 297 to 347;
[0099] h) amino acid sequences that have at least 80% amino acid identity with at least one of the amino acid sequences of SEQ ID NO's: 297 to 347;
[0100] i) amino acid sequences that have 3, 2, or 1 amino acid difference with at least one of the amino acid sequences of SEQ ID NO's: 297 to 347;
   or any suitable combination thereof.

[0101] When an amino acid sequence of the invention contains one or more amino acid sequences according to b) and/or c):
[0102] i) any amino acid substitution in such an amino acid sequence according to b) and/or c) is preferably, and compared to the corresponding amino acid sequence according to a), a conservative amino acid substitution, (as defined herein);
   and/or
[0103] ii) the amino acid sequence according to b) and/or c) preferably only contains amino acid substitutions, and no amino acid deletions or insertions, compared to the corresponding amino acid sequence according to a);
   and/or
[0104] iii) the amino acid sequence according to b) and/or c) may be an amino acid sequence that is derived from an amino acid sequence according to a) by means of affinity maturation using one or more techniques of affinity maturation known per se.

[0105] Similarly, when an amino acid sequence of the invention contains one or more amino acid sequences according to e) and/or f):
[0106] i) any amino acid substitution in such an amino acid sequence according to e) and/or f) is preferably, and compared to the corresponding amino acid sequence according to d), a conservative amino acid substitution, (as defined herein);
   and/or
[0107] ii) the amino acid sequence according to e) and/or f) preferably only contains amino acid substitutions, and no amino acid deletions or insertions, compared to the corresponding amino acid sequence according to d);
   and/or
[0108] iii) the amino acid sequence according to e) and/or f) may be an amino acid sequence that is derived from an amino acid sequence according to d) by means of affinity maturation using one or more techniques of affinity maturation known per se.

[0109] Also, similarly, when an amino acid sequence of the invention contains one or more amino acid sequences according to h) and/or i):
[0110] i) any amino acid substitution in such an amino acid sequence according to h) and/or i) is preferably, and compared to the corresponding amino acid sequence according to g), a conservative amino acid substitution, (as defined herein);
   and/or
[0111] ii) the amino acid sequence according to h) and/or i) preferably only contains amino acid substitutions, and no amino acid deletions or insertions, compared to the corresponding amino acid sequence according to g);
   and/or
[0112] iii) the amino acid sequence according to h) and/or i) may be an amino acid sequence that is derived from an amino acid sequence according to g) by means of affinity maturation using one or more techniques of affinity maturation known per se.

[0113] It should be understood that the last preceding paragraphs also generally apply to any amino acid sequences of the invention that comprise one or more amino acid sequences according to b), c), e), f), h) or i), respectively.

[0114] In this specific aspect, the amino acid sequence preferably comprises one or more stretches of amino acid residues chosen from the group consisting of:
[0115] i) the amino acid sequences of SEQ ID NO's: 93 to 143;
[0116] ii) the amino acid sequences of SEQ ID NO's: 195 to 245; and
[0117] iii) the amino acid sequences of SEQ ID NO's: 297 to 347;
   or any suitable combination thereof.

[0118] Also, preferably, in such an amino acid sequence, at least one of said stretches of amino acid residues forms part of the antigen binding site for binding against IL-6R.

[0119] In a more specific, but again non-limiting aspect, the invention relates to an ammo acid sequence directed against IL-6R, that comprises two or more stretches of amino acid residues chosen from the group consisting of:
[0120] a) the amino acid sequences of SEQ ID NO's: 93 to 143;
[0121] b) amino acid sequences that have at least 80% amino acid identity with at least one of the amino acid sequences of SEQ ID NO's: 93 to 143;
[0122] c) amino acid sequences that have 3, 2, or 1 amino acid difference with at least one of the amino acid sequences of SEQ ID NO's: 93 to 143;
[0123] d) the amino acid sequences of SEQ ID NO's: 195 to 245;
[0124] e) amino acid sequences that have at least 80% amino acid identity with at least one of the amino acid sequences of SEQ ID NO's: 195 to 245;
[0125] f) amino acid sequences that have 3, 2, or 1 amino acid difference with at least one of the amino acid sequences of SEQ ID NO's: 195 to 245;
[0126] g) the amino acid sequences of SEQ ID NO's: 297 to 347;
[0127] h) amino acid sequences that have at least 80% amino acid identity with at least one of the amino acid sequences of SEQ ID NO's: 297 to 347;
[0128] i) amino acid sequences that have 3, 2, or 1 amino acid difference with at least one of the amino acid sequences of SEQ ID NO's: 297 to 347;
   such that (i) when the first stretch of amino acid residues corresponds to one of the amino acid sequences according to a), b) or c), the second stretch of amino acid residues corresponds to one of the amino acid sequences according to d), e), f), g), h) or i); (ii) when the first stretch of amino acid residues corresponds to one of the amino acid sequences according to d), e) or f), the second stretch of amino acid residues corresponds to one of the amino acid sequences according to a), b), c), g), h) or i); or (iii) when the first stretch of amino acid residues corresponds to one of the amino acid sequences according to g), h) or i), the second stretch of amino acid residues corresponds to one of the amino acid sequences according to a), b), c), d), e) or f).

[0129] In this specific aspect, the amino acid sequence preferably comprises two or more stretches of amino acid residues chosen from the group consisting of:
[0130] i) the amino acid sequences of SEQ ID NO's: 93 to 143;
[0131] ii) the amino acid sequences of SEQ ID NO's: 195 to 245; and
[0132] iii) the amino acid sequences of SEQ ID NO's: 297 to 347;
   such that, (i) when the first stretch of amino acid residues corresponds to one of the amino acid sequences of SEQ ID NO's: 93 to 143, the second stretch of amino acid residues corresponds to one of the amino acid sequences of SEQ ID NO's: 195 to 245 or of SEQ ID NO's: 297 to 347; (ii) when the first stretch of amino acid residues corresponds to one of the amino acid sequences of SEQ ID NO's: 195 to 245, the second stretch of amino acid residues corresponds to one of the amino acid sequences of SEQ ID NO's: 93 to 143 or of SEQ ID NO's: 297 to 347; or (iii) when the first stretch of amino acid residues corresponds to one of the amino acid sequences of SEQ ID NO's: 297 to 347, the second stretch of amino acid residues corresponds to one of the amino acid sequences of SEQ ID NO's: 93 to 143 or of SEQ ID NO's: 195 to 245.

[0133] Also, in such an amino acid sequence, the at least two stretches of amino acid residues again preferably form part of the antigen binding site for binding against IL-6R.

[0134] In an even more specific, but non-limiting aspect, the invention relates to an amino acid sequence directed against IL-6R, that comprises three or more stretches of amino acid residues, in which the first stretch of amino acid residues is chosen from the group consisting of:
[0135] a) the amino acid sequences of SEQ ID NO's: 93 to 143;
[0136] b) amino acid sequences that have at least 80% amino acid identity with at least one of the amino acid sequences of SEQ ID NO's: 93 to 143;
[0137] c) amino acid sequences that have 3, 2, or 1 amino acid difference with at least one of the amino acid sequences of SEQ ID NO's: 93 to 143;
   the second stretch of amino acid residues is chosen from the group consisting of:
[0138] d) the amino acid sequences of SEQ ID NO's: 195 to 245;
[0139] e) amino acid sequences that have at least 80% amino acid identity with at least one of the amino acid sequences of SEQ ID NO's: 195 to 245;
[0140] f) amino acid sequences that have 3, 2, or 1 amino acid difference with at least one of the amino acid sequences of SEQ ID NO's: 195 to 245;
   and the third stretch of amino acid residues is chosen from the group consisting of:
[0141] g) the amino acid sequences of SEQ ID NO's: 297 to 347;
[0142] h) amino acid sequences that have at least 80% amino acid identity with at least one of the amino acid sequences of SEQ ID NO's: 297 to 347;
[0143] i) amino acid sequences that have 3, 2, or 1 amino acid difference with at least one of the amino acid sequences of SEQ ID NO's: 297 to 347.

[0144] Preferably, in this specific aspect, the first stretch of amino acid residues is chosen from the group consisting of the amino acid sequences of SEQ ID NO's: 93 to 143; the second stretch of amino acid residues is chosen from the group consisting of the amino acid sequences of SEQ ID NO's: 195 to 245; and the third stretch of amino acid residues is chosen from the group consisting of the amino acid sequences of SEQ ID NO's: 297 to 347.

[0145] Again, preferably, in such an amino acid sequence, the at least three stretches of amino acid residues forms part of the antigen binding site for binding against IL-6R.

[0146] Preferred combinations of such stretches of amino acid sequences will become clear from the further disclosure herein.

[0147] Preferably, in such amino acid sequences the CDR sequences have at least 70% amino acid identity, preferably at least 80% amino acid identity, more preferably at least 90% amino acid identity, such as 95% amino acid identity or more or even essentially 100% amino acid identity with the CDR sequences of at least one of the amino acid sequences of SEQ ID NO's 399 to 471

[0148] Also, such amino acid sequences are preferably such that they can specifically bind (as defined herein) to IL-6R; and more in particular bind to IL-6R with an affinity (suitably measured and/or expressed as a K_{D}-value (actual or apparent), a K_{A}-value (actual or apparent), a kₒₙ-rate and/or a k_{off}-rate, or alternatively as an IC₅₀ value, as further described herein) that is as defined herein.

[0149] When the amino acid sequence of the invention essentially consists of 4 framework regions (FR1 to FR4, respectively) and 3 complementarity determining regions (CDR1 to CDR3, respectively), the amino acid sequence of the invention is preferably such that:

[0150] CDR1 is chosen from the group consisting of:
[0151] a) the amino acid sequences of SEQ ID NO's: 93 to 143;
[0152] b) amino acid sequences that have at least 80% amino acid identity with at least one of the amino acid sequences of SEQ ID NO's: 93 to 143;
[0153] c) amino acid sequences that have 3, 2, or 1 amino acid difference with at least one of the amino acid sequences of SEQ ID NO's: 93 to 143;
   and/or

[0154] CDR2 is chosen from the group consisting of:
[0155] d) the amino acid sequences of SEQ ID NO's: 195 to 245;
[0156] e) amino acid sequences that have at least 80% amino acid identity with at least one of the amino acid sequences of SEQ ID NO's: 195 to 245;
[0157] f) amino acid sequences that have 3, 2, or 1 amino acid difference with at least one of the amino acid sequences of SEQ ID NO's: 195 to 245;
   and/or

[0158] CDR3 is chosen from the group consisting of
[0159] g) the amino acid sequences of SEQ ID NO's: 297 to 347;
[0160] h) amino acid sequences that have at least 80% amino acid identity with at least one of the amino acid sequences of SEQ ID NO's: 297 to 347;
[0161] i) amino acid sequences that have 3, 2, or 1 amino acid difference with at least one of the amino acid sequences of SEQ ID NO's: 297 to 347.

[0162] In particular, such an amino acid sequence of the invention may be such that CDR1 is chosen from the group consisting of the amino acid sequences of SEQ ID NO's: 93 to 143; and/or CDR2 is chosen from the group consisting of the amino acid sequences of SEQ ID NO's: 195 to 245; and/or CDR3 is chosen from the group consisting of the amino acid sequences of SEQ ID NO's: 297 to 347.

[0163] In particular, when the amino acid sequence of the invention essentially consists of 4 framework regions (FR1 to FR4, respectively) and 3 complementarity determining regions (CDR1 to CDR3, respectively), the amino acid sequence of the invention is preferably such that:

[0164] CDR1 is chosen from the group consisting of:
[0165] a) the amino acid sequences of SEQ ID NO's: 93 to 143;
[0166] b) amino acid sequences that have at least 80% amino acid identity with at least one of the amino acid sequences of SEQ ID NO's: 93 to 143;
[0167] c) amino acid sequences that have 3, 2, or 1 amino acid difference with at least one of the amino acid sequences of SEQ ID NO's: 93 to 143;
   and

[0168] CDR2 is chosen from the group consisting of:
[0169] d) the amino acid sequences of SEQ ID NO's: 195 to 245;
[0170] e) amino acid sequences that have at least 80% amino acid identity with at least one of the amino acid sequences of SEQ ID NO's: 195 to 245;
[0171] f) amino acid sequences that have 3, 2, or 1 amino acid difference with at least one of the amino acid sequences of SEQ ID NO's: 195 to 245;
   and

[0172] CDR3 is chosen from the group consisting of:
[0173] g) the amino acid sequences of SEQ ID NO's: 297 to 347;
[0174] h) amino acid sequences that have at least 80% amino acid identity with at least one of the amino acid sequences of SEQ ID NO's: 297 to 347;
[0175] i) amino acid sequences that have 3, 2, or 1 amino acid difference with at least one of the amino acid sequences of SEQ ID NO's: 297 to 347; or any suitable fragment of such an amino acid sequence

[0176] In particular, such an amino acid sequence of the invention may be such that CDR1 is chosen from the group consisting of the amino acid sequences of SEQ ID NO's: 93 to 143; and CDR2 is chosen from the group consisting of the amino acid sequences of SEQ ID NO's: 195 to 245; and CDR3 is chosen from the group consisting of the amino acid sequences of SEQ ID NO's: 297 to 347.

[0177] Again, preferred combinations of CDR sequences will become clear from the further description herein.

[0178] Also, such amino acid sequences are preferably such that they can specifically bind (as defined herein) to IL-6R; and more in particular bind to IL-6R with an affinity (suitably measured and/or expressed as a 1K_{D}-value (actual or apparent), a K_{A}-value (actual or apparent), a ICₒₙ-rate and/or a k_{off}-rate, or alternatively as an IC₅₀ value, as further described herein) that is as defined herein.

[0179] In one preferred, but non-limiting aspect, the invention relates to an amino acid sequence that essentially consists of 4 framework regions (FR1 to FR4, respectively) and 3 complementarity determining regions (CDR1 to CDR3, respectively), in which the CDR sequences of said amino acid sequence have at least 70% amino acid identity, preferably at least 80% amino acid identity, more preferably at least 90% amino acid identity, such as 95% amino acid identity or more or even essentially 100% amino acid identity with the CDR sequences of at least one of the amino acid sequences of SEQ ID NO's: 399 to 471. This degree of amino acid identity can for example be determined by determining the degree of amino acid identity (in a manner described herein) between said amino acid residue and one or more of the sequences of SEQ ID NO's: 399 to 471, in which the amino acid residues that form the framework regions are disregarded. Such amino acid sequences of the invention can be as further described herein.

[0180] In such an amino acid sequence of the invention, the framework sequences may be any suitable framework sequences, and examples of suitable framework sequences will be clear to the skilled person, for example on the basis the standard handbooks and the further disclosure and prior art mentioned herein.

[0181] The framework sequences are preferably (a suitable combination of) immunoglobulin framework sequences or framework sequences that have been derived from immunoglobulin framework sequences (for example, by humanization or camelization). For example, the framework sequences may be framework sequences derived from a light chain variable domain (e.g. a V_{L}-sequence) and/or from a heavy chain variable domain (e.g. a Vₛ-sequence). In one particularly preferred aspect, the framework sequences are either framework sequences that have been derived from a V_{HH}-sequence (in which said framework sequences may optionally have been partially or fully humanized) or are conventional V_{H} sequences that have been camelized (as defined herein).

[0182] The framework sequences are preferably such that the amino acid sequence of the invention is a domain antibody (or an amino acid sequence that is suitable for use as a domain antibody); is a single domain antibody (or an amino acid sequence that is suitable for use as a single domain antibody); is a “dAb” (or an amino acid sequence that is suitable for use as a dAb); or is a Nanobody® (including but not limited to V_{HH} sequence). Again, suitable framework sequences will be clear to the skilled person, for example on the basis the standard handbooks and the further disclosure and prior art mentioned herein.

[0183] In particular, the framework sequences present in the amino acid sequences of the invention may contain one or more of Hallmark residues (as defined herein), such that the amino acid sequence of the invention is a Nanobody®. Some preferred, but non-limiting examples of (suitable combinations of) such framework sequences will become clear from the further disclosure herein.

[0184] Again, as generally described herein for the amino acid sequences of the invention, it is also possible to use suitable fragments (or combinations of fragments) of any of the foregoing, such as fragments that contain one or more CDR sequences, suitably flanked by and/or linked via one or more framework sequences (for example, in the same order as these CDR's and framework sequences may occur in the full-sized immunoglobulin sequence from which the fragment has been derived). Such fragments may also again be such that they comprise or can form an immunoglobulin fold, or alternatively be such that they do not comprise or cannot form an immunoglobulin fold.

[0185] In one specific aspect, such a fragment comprises a single CDR sequence as described herein (and in particular a CDR3 sequence), that is flanked on each side by (part of) a framework sequence (and in particular, part of the framework sequence(s) that, in the immunoglobulin sequence from which the fragment is derived, are adjacent to said CDR sequence. For example, a CDR3 sequence may be preceded by (part of) a FR3 sequence and followed by (part of) a FR4 sequence). Such a fragment may also contain a disulphide bridge, and in particular a disulphide bridge that links the two framework regions that precede and follow the CDR sequence, respectively (for the purpose of forming such a disulphide bridge, cysteine residues that naturally occur in said framework regions may be used, or alternatively cysteine residues may be synthetically added to or introduced into said framework regions). For a further description of these “Expedite fragments”, reference is again made to WO 03/050531).

TABLE A-1
Preferred combinations of CDR and framework sequences.

| CLONE | ID | FR1 | ID | CDR1 | ID | FR2 | ID | CDR2 | ID | FR3 | ID | CDR3 | ID | FR4 |
|---|---|---|---|---|---|---|---|---|---|---|---|---|---|---|
| PMP40C9(t) | 42 | EVQLVESGGGLVQPGGSLRLSCAASGFSLD | 93 | YYAIG | 144 | WFRQAPGKEREGVS | 195 | CMDSSAGTT | 246 | RFTISRDDAKN | 297 | DGHLNWGQ | 348 | WGQGTQVTVSS |
| | | | | | | | | STYYSDSVKG | | TVYLQMNSLKP | | RYVPCSQIS | | |
| | | | | | | | | | | EDTAVYYCAA | | WRGWNDY | | |
| PMP34F8(t) | 43 | EVQLVESGGGLVQPGGSLRLSCAASGFSLD | 94 | YYAIG | 145 | WFRQAPGK | 196 | CMDSSDGTT | 247 | RFTISRDDAKN | 298 | DGHLNWGQ | 349 | WGQGTQ |
| | | | | | | EREGVS | | NTYYSDSVKG | | TVYLQMNSLKP | | PYVPCSQIS | | VTVSS |
| | | | | | | | | | | EDTASYYCAA | | WRGWNDY | | |
| PMP34E9(t) | 44 | EVQLVESGGGLVQPGGSLRLSCAASGFTLD | 95 | YYAIG | 146 | WFRQAPGK | 197 | CISSSDGSTY | 248 | RFTISRDNAKN | 299 | DRSVYYCSG | 350 | WGQGTQVTVSS |
| | | | | | | EREGVS | | YADSVKG | | TVYLQMNSLKP | | DAPEEYY | | |
| | | | | | | | | | | EDTAAYYCAT | | | | |
| PMP34D2(t) | 45 | EVQLVESGGGLVQPGGSLRLSCAASGFTLD | 96 | YFAIG | 147 | WFRQAPGK | 198 | CISSSDGSTY | 249 | RFTISRDNAKN | 300 | DRSVYYCSG | 351 | WGQGTQ |
| | | | | | | ERERVS | | YADSVKG | | TVYLQMNSLKP | | GAPEEYY | | VTVSS |
| | | | | | | | | | | EDTAVYYCAT | | | | |
| PMP34C3(t) | 46 | EVQLVESGGGLVQPGGSLRLSCVASGFSLD | 97 | YYVIG | 148 | WFRQAPGK | 199 | CISSSDGSTY | 250 | RFTISRDNAKN | 301 | DLLRTPEFC | 352 | WGRGTQ |
| | | | | | | EREGVS | | YADSVKG | | TVYLQMNSLKP | | VDSAPYDY | | VTVSS |
| | | | | | | | | | | EDTAVYYCAA | | | | |
| PMP34A5(t) | 47 | EVQLVESGGGLVQPGGSLRLSCAASGFTLG | 98 | YFAIG | 149 | WFRQAPGKEREGVS | 200 | CISSSDGSTY | 251 | RFTVSRDNAK | 302 | DRSVYYCSG | 353 | WGQGTQ |
| | | | | | | | | YADSVKG | | NTVYLQMNSLK | | GAPEEYY | | VTVSS |
| | | | | | | | | | | PEDTAVYYCAT | | | | |
| PMP33G3(t) | 48 | EVQLVESGGGLVQPGGSLRLSCAASGFTLG | 99 | YFAIG | 150 | WFRQAPG | 201 | CISSSDGSA | 252 | RFTVSRDNA | 303 | DRSVYYCS | 354 | WGQGT |
| | | | | | | KEREGVS | | YYADSVKG | | KNTVYLQMN | | GGAPEEYY | | QVTVSS |
| | | | | | | | | | | SLKPEDTAVY | | | | |
| | | | | | | | | | | YCAT | | | | |
| PMP33C10(t) | 49 | EVQLVESGGGLVQPGGSLRLSCAASGFTFD | 100 | DYGMS | 151 | WVRQAPG | 202 | AISWNGGS | 253 | RFTISRDNAK | 304 | GSTAIVGV | 355 | WGQGTQVTVSS |
| | | | | | | KGLEWVS | | TYYTESMKG | | NTVYLQMNS | | PPTYPDEY | | |
| | | | | | | | | | | LKPEDTAVYY | | DY | | |
| | | | | | | | | | | CVK | | | | |
| PMP33A2(t) | 50 | EVQLVESGGGLVQPGGSLRLSCAASGFSLD | 101 | YYAIG | 152 | WFRQAPG | 203 | CMDSSGGTT | 254 | RFTISRDDAKN | 305 | DGHLNWGQ | 356 | WGQGT |
| | | | | | | KEREGVS | | STYYSDSVKG | | TVYLQMNSLKP | | RYVPCSQIS | | QVTVSS |
| | | | | | | | | | | EDTAVYYCAA | | WRGWNDY | | |
| PMP32H5(t) | 51 | EVQLVESGGGLVQPGGSLRLSCAASGFTFG | 102 | SYDMS | 153 | WVRQAPG | 204 | AINSGGGST | 255 | RFTISRDNAKN | 306 | DWRYSDYDL | 357 | WGQGTQVTVSS |
| | | | | | | KGPEWVS | | YYADSVKG | | TLYLQMNSLKP | | PLPPPGDY | | |
| | | | | | | | | | | EDTAVYYCAT | | | | |
| PMP32F10(t) | 52 | EVQLVESGGGLVQAGGSLRLSCAASGFTFD | 103 | DYAIG | 154 | WFRQAPG | 205 | CISSSDGST | 256 | RFTISSDNAKN | 307 | EPPDSSWIL | 358 | WGQGT |
| | | | | | | KEREGIS | | YYADSVKG | | TVYLQMNSLKP | | DGSPEFFKF | | QVTVSS |
| | | | | | | | | | | EDTAVYYCAA | | | | |
| PMP31F4(t) | 53 | EVQLVESGGGLVQPGGSLRLSCAASGFTFG | 104 | SYDMS | 155 | WVRQAPGKGPEWVS | 206 | AINSGGGST | 257 | RFTISRDNAKN | 308 | DWRYSDYDL | 359 | WGQGT |
| | | | | | | | | YYADSVKG | | TLYLQMNSLKP | | PLPPPGDY | | QVTVSS |
| | | | | | | | | | | EDTAVYYCAT | | | | |
| PMP31D2(t) | 54 | EVQLVESGGGLVQAGGSLRLSCAASGFTFD | 105 | DYAIG | 156 | WFRQAPG | 207 | GISSSDGNT | 258 | RFTISSDNAKN | 309 | EPPDSNWYL | 360 | WGQGT |
| | | | | | | KEREGVS | | YYADSVKG | | TVYLQMNSLKP | | DGSPEFFKF | | QVTVSS |
| | | | | | | | | | | EDTAVYYCAA | | | | |
| PMP31C8(t) | 55 | EVQLVESGGGLVQPGGSLRLSCAASGFTFG | 106 | SYDMS | 157 | WVRQAPG | 208 | AINSGGGST | 259 | RFTISRDNAKN | 310 | DWRYSDYDL | 361 | WGQGT |
| | | | | | | KGPEWVS | | YYADSVKG | | TLYLQMNSLKP | | PLPPPGDY | | QVTVSS |
| | | | | | | | | | | EDTAVYYCAT | | | | |
| PMP31C5(t) | 56 | EVQLVESGGGLVQAGGSLRLSCAASGFTFD | 107 | DYAIG | 158 | WFRQAPG | 209 | CISSSDGST | 260 | RFTISSDNAKN | 311 | EPPDSMWSL | 362 | WGQGT |
| | | | | | | KEREGVS | | YYADSVKG | | TVYLLMNSLKP | | DGSPEFFKF | | QVTVSS |
| | | | | | | | | | | EDTAVYYCAA | | | | |
| PMP31B4(t) | 57 | EVQLVESGGGLVQPGGSLRLSCAASGFTFG | 108 | SYDMS | 159 | WVRQAPG | 210 | AINSGGGST | 261 | RFTISRDNAKN | 312 | DWRYSDYDL | 363 | WGQGT |
| | | | | | | KGPEWVS | | YYADSVKG | | TLYLQMNSLKP | | PLPPPGDY | | QVTVSS |
| | | | | | | | | | | EDTAVYYCAT | | | | |
| PMP31B11(t) | 58 | EVQLVESGGGLVQPGGSLRLSCAASGFTFG | 109 | SYDMS | 160 | WVRQAPG | 211 | AINSGGGST | 262 | RFTISRDNAKN | 313 | DWRYSDYDL | 364 | WGQGTQ |
| | | | | | | KGPEWVS | | YYADSVKG | | TLYLQMNSLKP | | PLPPPGDY | | VTVSS |
| | | | | | | | | | | EDTAVYYCAT | | | | |
| PMP30G11(t) | 59 | EVQLVESGGGLVQPGGSLRLSCVASGFSLD | 110 | YYVIG | 161 | WFRQAPG | 212 | CISSSDGSTY | 263 | RFTISRDNAKN | 314 | DLLRTPEFC | 365 | WGQGTQ |
| | | | | | | KEREGVS | | YADSVKG | | TVYLQMNSLKP | | VDSAPYDY | | VTVSS |
| | | | | | | | | | | EDTAVYYCAA | | | | |
| PMP30B6(t) | 60 | EVQLVESGGGLVQPGGSLRLSCAASGFTLD | 111 | YYVIG | 162 | WFRQAPG | 213 | CISSSDRSTY | 264 | RFTISRDNAKN | 315 | DLLRTPEFC | 366 | WGQGTQVTVSS |
| | | | | | | KEREAVA | | YADSVKG | | TGYLQMNSLK | | SDSAPYDY | | |
| | | | | | | | | | | PEDTAVYYCAA | | | | |
| PMP30B1(t) | 61 | EVQLVESGGGLVQPGGSLRLSCAASGFTLD | 112 | YYAIG | 163 | WWRQAPG | 214 | CISSGDGST | 265 | RFTISRDNAKN | 316 | DRSVYYCSG | 367 | WGQGTQ |
| | | | | | | KGREGVS | | NYADSVKG | | TVYLQMNSLKP | | GAPEEYY | | VTVSS |
| | | | | | | | | | | EDTAVYYCAT | | | | |
| PMP30A2(t) | 62 | EVQLVESGGGLVQPGGSLRLSCAASGFTLD | 113 | YYVIG | 164 | WFRQAPGKEREGVS | 215 | CIGSSDDST | 266 | RFTISRDNAKN | 317 | DLLRTPEFCT | 368 | WGQGTQ |
| | | | | | | | | YYADSVKG | | TVYLQMNSLKP | | DSAPYDY | | VTVSS |
| | | | | | | | | | | EDTAVYYCAA | | | | |
| PMP30A10(t) | 63 | EVQLVESGGGLVQPGGSLRLSCAASGFTFD | 114 | DYGMS | 165 | WVRQAPG | 216 | AISWNGGST | 267 | RFTISRDNAKN | 318 | GSTAIVGVPP | 369 | WGQGTQ |
| | | | | | | KGLEWVS | | YYTESVKG | | TVYLQMNSLKP | | TYPDEYDY | | VTVSS |
| | | | | | | | | | | EDTAVYYCVK | | | | |
| PMP28H6(t) | 64 | EVQLVESGGGLVQPGGSLRLSCAASGFTFG | 115 | SYDMS | 166 | WVRQAPG | 217 | AINSGGGST | 268 | RFTISRDNAKN | 319 | DWRYSDYDL | 370 | WGQGTQ |
| | | | | | | KGPEWVS | | YYADSVKG | | TLYLQMNSLKP | | PLPPPGDY | | VTVSS |
| | | | | | | | | | | EDTAVYYCAT | | | | |
| PMP28F7(t) | 65 | EVQLVESGGGLVQPGGSLRLSCAASGFTFG | 116 | SYDMS | 167 | WVRQAPG | 218 | AINSGGGST | 269 | RFTISRDNAKN | 320 | DWRYSDYDL | 371 | WGQGTQ |
| | | | | | | KGPEWVS | | YYADSVKG | | TLYLQMNSLKP | | PLPPPGDY | | VTVSS |
| | | | | | | | | | | EDTAVYYCAT | | | | |
| PMP28D4(t) | 66 | EVQLVESGGGLVQPGGSLRLSCAASGFTFG | 117 | SYDMS | 168 | WVRQAPG | 219 | AINSGGGST | 270 | RFTISRDNAKN | 321 | DWRYSDYDL | 372 | WGQGTQ |
| | | | | | | KGPEWVS | | YYADSVKG | | TLYLQMNSLKP | | PLPPPGDY | | VTVSS |
| | | | | | | | | | | EDTAVYYCAT | | | | |
| PMP28C7(t) | 67 | EVQLVESGGGLVQPGGSLRLSCAASGFTFG | 118 | SYDMS | 169 | WVRQAPG | 220 | AINSGGDNTY | 271 | RFTISRDNAKNT | 322 | DWRYSDYDLP | 373 | WGQGTQVTVSS |
| | | | | | | KGPEWVS | | YADSVKG | | LYLQMNSLKPED | | LPPPGDY | | |
| | | | | | | | | | | TAVYYCAT | | | | |
| PMP28B1(t) | 68 | EVQLVESGGGLVQPGGSLRLSCAASGFTLN | 119 | YYAIG | 170 | WFRQAPG | 221 | CISSSDGSTY | 272 | RFTISRDNAKNT | 323 | EGLGDSDSPC | 374 | WGQGTQ |
| | | | | | | KEREGVS | | YADSVKG | | FYLQMNSLKPED | | GAAWYNDY | | VTVSS |
| | | | | | | | | | | TAVYYCAA | | | | |
| PMP28A2(t) | 69 | EVQLVESGGGLVQPGGSLRLSCAASGFTFG | 120 | SYDMS | 171 | WVRQAPG | 222 | AINSGGGSTY | 273 | RFTISRDNAKNT | 324 | DWRYSDYDLP | 375 | WGQGTQ |
| | | | | | | KGPEWVS | | YADSVKG | | LYLQMNSLKPED | | LPPPGDY | | VTVSS |
| | | | | | | | | | | TAVYYCAT | | | | |
| PMP40H5 | 70 | EVQLVESGGGLVQPGGSLRLSCAASGFSLD | 121 | YYAIG | 172 | WFRQAPG | 223 | CMDSSSGTT | 274 | RFTISRDDAKNT | 325 | DGHLNWGQR | 376 | WGQGTQ |
| | | | | | | KEREGVS | | STYYSDSVKG | | VYLQMNSLKPED | | YVPCSQISWR | | VTVSS |
| | | | | | | | | | | TAVYYCAA | | GWNDY | | |
| PMP35H4 | 71 | EVQLVESGGGLVQPGGSLRLSCAASGFTFD | 122 | DYGMS | 173 | WVRQAPGRATEWVS | 224 | AISWNGNNTY | 275 | RFTISRDNAKNT | 326 | GSTAIVGVPPT | 377 | WGQGTQ |
| | | | | | | | | YTESMKG | | VYLQMNSLKPED | | YPDEYDY | | VTVSS |
| | | | | | | | | | | TAVYYCVK | | | | |
| PMP35F4 | 72 | EVQLVESGGGLVQAGGSLRLSCAASGRTFS | 123 | SYDMG | 174 | WYRQAPG | 225 | IITWNSSTYYA | 276 | RFTISRDNAKNT | 327 | QYGLGYAEDY | 378 | WGQGTQ |
| | | | | | | KEREFVA | | DSVKG | | VYLQMNSLKPED | | | | VTVSS |
| | | | | | | | | | | TAIYYCNA | | | | |
| PMP35E11 | 73 | EVQLVESGGGLVQAGGSLRLSCAASGFTFD | 124 | DYAIG | 175 | WFRQAPG | 226 | CISSSDGSTY | 277 | RFTISSDNAKNT | 328 | ERDVPARSLC | 379 | RGQGTQ |
| | | | | | | KEHEGVS | | YADSVKG | | VYLQMNSLKPED | | GSYYWYDY | | VTVSS |
| | | | | | | | | | | TAVYYCAA | | | | |
| PMP35C10 | 74 | EVQLVESGGGLVQAGGSLRLSCAASGRTFS | 125 | SYDMG | 176 | WYRQAPG | 227 | VIHWSSGSTY | 278 | RFTISRDNAKNT | 329 | FLPGPEGFHDY | 380 | WGQGTQ |
| | | | | | | KEREFVA | | YADPVKG | | VYLQMNSLKPED | | | | VTVSS |
| | | | | | | | | | | TAIYYCNA | | | | |
| PMP34G9 | 75 | EVQLVESGGGLVQAGGSLRLSCAASGRTSS | 126 | SYDMT | 177 | WYRQVPG | 228 | VISWSGGSTY | 279 | RFTISRDNAKNT | 330 | YTGGGDDY | 381 | WGQGTQ |
| | | | | | | KEREFVA | | YADSVKG | | VYLQMNSLKPED | | | | VTVSS |
| | | | | | | | | | | TAIYYCNA | | | | |
| PMP34G3 | 76 | EVQLVESGGGLVQPGGSLRLSCAASGFTLD | 127 | YYAIG | 178 | WFRQAPG | 229 | CISSSDGSTY | 280 | RFTISRDNAKN | 331 | DRSVYYCSG | 382 | WGQGTQ |
| | | | | | | KERERVS | | YADSVKG | | TVYLQMNSLKP | | GAPEEYY | | VTVSS |
| | | | | | | | | | | EDTAAYYCAT | | | | |
| PMP34E10 | 77 | EVQLVESGGGLVQAGGSLRLSCAASGRTFS | 128 | SYAMG | 179 | WGRQAPG | 230 | TISWSGGST | 281 | RFTISRDNAKN | 332 | DLAEFKYSD | 383 | WGQGTQ |
| | | | | | | KEREFVA | | YYADSVKG | | TVYLQMNSLKP | | YADY | | VTVSS |
| | | | | | | | | | | EDTAVYYCAA | | | | |
| PMP34C11 | 78 | EVQLVESGGGLVQPGGSLRLSCAAAGFTLD | 129 | YSAIG | 180 | WFRQAPG | 231 | CISGSDGST | 282 | RFTISFDNAKN | 333 | TGGVRGPCA | 384 | WGQGTQVTVSS |
| | | | | | | KEREMFS | | WYADSVAG | | TVYLQMNSLKP | | YEYEY | | |
| | | | | | | | | | | EDTGLYICAV | | | | |
| PMP34A12 | 79 | EVQLVESGGGLVQPGGSLRLSCVASGFSLD | 130 | YYVIG | 181 | WFRQAPG | 232 | CISSSDGSTY | 283 | RFTISRDNAKN | 334 | DLLRTPEFC | 385 | WGQGTQ |
| | | | | | | KEREGVS | | YADSVKG | | TVYLQMNSLKP | | VDSAPYDY | | VTVSS |
| | | | | | | | | | | EDTAVYYCAA | | | | |
| PMP33A3 | 80 | EVQLVESGGGLVQPGGSLRLSCAASGFTLD | 131 | YGAIG | 182 | WFRQAPGKEREGVS | 233 | CISSSTGSTY | 284 | RFTISRDNGKN | 335 | DKMWSPCL | 386 | WGQGTQ |
| | | | | | | | | YADSVKG | | TVYLQMNSLKP | | VAANEEALF | | VTVSS |
| | | | | | | | | | | EDTAVYYCAA | | EYDY | | |
| PMP32E2 | 81 | EVQLVESGGGLVQAGGSLRLSCAASGNIFD | 132 | DNTMGWT | 183 | WNRQPPG | 234 | IIATDGSTNY | 285 | RFTISRDNAKN | 336 | FSLRLGRDY | 387 | WGQGTQ |
| | | | | | | KQRELVA | | ADSVKG | | TVYLQMNSLKP | | | | VTVSS |
| | | | | | | | | | | EDTAVYYCNL | | | | |
| PMP32E10 | 82 | EVQLVESGGGLVQPGGSLRLSCAASGFTFG | 133 | SYDMS | 184 | WVRQAPG | 235 | AINSGGGST | 286 | RFTISRDNAKN | 337 | DWRYSDYDL | 388 | WGQGTQ |
| | | | | | | KGPEWVS | | YYADSVKG | | TLYLQMNSLKP | | PLPPPGDY | | VTVSS |
| | | | | | | | | | | EDTAVYYCAT | | | | |
| PMP32C9 | 83 | EVQLVESGGGLVQAGGSLRLSCAASGFTFD | 134 | DYDIG | 185 | WFRQAPG | 236 | GISSSDGNT | 287 | RFTISSDNAKN | 338 | EPPDSSWYL | 389 | WGQGTQ |
| | | | | | | KEREGVS | | YYADSVKG | | TVYLQMNSLKP | | DGSPEFFKY | | VTVSS |
| | | | | | | | | | | EDTAVYYCAA | | | | |
| PMP31A4 | 84 | EVQLVESGGGLVQAGGSLRLSCAASGSIFK | 135 | VNAMG | 186 | WYRQAPG | 237 | GIISGGSTNY | 288 | RLTISRDNAKN | 339 | VTTNSDYDL | 390 | WGQGTQ |
| | | | | | | KQRELVA | | ADSVKG | | TVYLQMNSLKP | | GRDY | | VTVSS |
| | | | | | | | | | | EDTAVYYCSF | | | | |
| PMP30C11 | 85 | EVQLVESGGGLVQAGGSLRLSCAASGRTFS | 136 | SYDMG | 187 | WYRQAPG | 238 | VISRSGSSTY | 289 | RFTISRDNAKNT | 340 | EVVAGD | 391 | WGQGTQV |
| | | | | | | KEREFVA | | YADSVKG | | VYLQMNSLKPED | | YDY | | TVSS |
| | | | | | | | | | | TAIYYCKA | | | | |
| PMP28G3 | 86 | EVQLVESGGGLVQAGGSLRLSCTASGNIFS | 137 | TETMG | 188 | WYRQPPG | 239 | ATITHGGTTN | 290 | RFTISRDNRKNT | 341 | RSSWYS | 392 | WGQGTQV |
| | | | | | | KQRDVV | | YADSVKG | | VYLQMNSLKPED | | PEY | | TVSS |
| | | | | | | | | | | TGVYYCNA | | | | |
| PMP28E11 | 87 | EVQLVESGGGFVQAGGSLRLSCIASGDNFS | 138 | INRMG | 189 | WYRQALG | 240 | IITNHGSTNY | 291 | RFTISRDYAKNTV | 342 | YISEVGT | 393 | WGQGIQVTVSS |
| | | | | | | KQRELVA | | ADAVKG | | YLQMNGLKPDDT | | WRDDY | | |
| | | | | | | | | | | AVYYCNA | | | | |
| 059B.IL6R.cl5.7(t) | 88 | EVQLVESGGGLVQAGGSLRLSCAASGRTFS | 139 | GADAG | 190 | WNRQTPG | 241 | AINWSGNST | 292 | RFTVSRDNAKNT | 343 | FRDDYYS | 394 | EGKGTLVT |
| | | | | | | KEREFVA | | YYADSVKG | | VYLQMNSLKPED | | | | VSS |
| | | | | | | | | | | TAVYYCHA | | | | |
| 059A.IL6Rcl4(t) | 89 | EVQLVESGGGLVQAGGSLRLSCAASGRTLS | 140 | SYDMG | 191 | WYRQGPGKEREFVA | 242 | AISWSGGGT | 293 | RFTISRDTAKNT | 344 | LGTTDSD | 395 | WGQGTQV |
| | | | | | | | | DYVDSVKG | | MYLQMNSLKPED | | YEGELY | | TVSS |
| | | | | | | | | | | TAIYYCNA | | | | |
| 059A.IL6Rcl3(t) | 90 | EVQLVESGGGLVQPGGSLRLSCAASGFTLD | 141 | SYAIG | 192 | WFRQAPG | 243 | CISTSDGSTY | 294 | RFTISRDNAKNT | 345 | DGGPHA | 396 | WGQGTQV |
| | | | | | | KEPEGVS | | YADSVKG | | VYLQMNSLKPED | | PLTVQD | | TVSS |
| | | | | | | | | | | TAVYYCTA | | MCVMAIA | | |
| | | | | | | | | | | | | DY | | |
| 059A.IL6Rcl2(t) | 91 | EVQLVESGGGLVQAGGSLRLSCAASGRTFS | 142 | NIAMG | 193 | WIREAPGK | 244 | ALTWSGGST | 295 | RFTISRDSAKNTV | 346 | DEEIHLIV | 397 | WGQGTQV |
| | | | | | | EREFVA | | YYADSVKG | | YLQMNKLKPEDT | | SISIADF | | TVSS |
| | | | | | | | | | | AVYYCVA | | | | |
| 059A.IL6Rcl1(t) | 92 | EVQLVESGGGLVQAGGSLRLSCAASGLTDD | 143 | DFAIG | 194 | WFRQAPG | 245 | CISSSDGSTY | 296 | RFTISSDNAKNTV | 347 | LFDRCGS | 398 | WGKGTLV |
| | | | | | | KEPEGVS | | YADSVKG | | YLQMNSLKPEDT | | TWYYGM | | TVSS |
| | | | | | | | | | | AVYFCTA | | DY | | |

[0186] In another aspect, the invention relates to a compound or construct, and in particular a protein or polypeptide (also referred to herein as a “compound of the invention” or “polypeptide of the invention”, respectively) that comprises or essentially consists of one or more amino acid sequences of the invention (or suitable fragments thereof), and optionally further comprises one or more other groups, residues, moieties or binding units. As will become clear to the skilled person from the further disclosure herein, such further groups, residues, moieties, binding units or amino acid sequences may or may not provide further functionality to the amino acid sequence of the invention (and/or to the compound or construct in which it is present) and may or may not modify the properties of the amino acid sequence of the invention.

[0187] For example, such further groups, residues, moieties or binding units may be one or more additional amino acid sequences, such that the compound or construct is a (fusion) protein or (fusion) polypeptide. In a preferred but non-limiting aspect, said one or more other groups, residues, moieties or binding units are immunoglobulin sequences. Even more preferably, said one or more other groups, residues, moieties or binding units are chosen from the group consisting of domain antibodies, amino acid sequences that are suitable for use as a domain antibody, single domain antibodies, amino acid sequences that are suitable for use as a single domain antibody, “dAb”'s, amino acid sequences that are suitable for use as a dAb, or Nanobodies®.

[0188] Alternatively, such groups, residues, moieties or binding units may for example be chemical groups, residues, moieties, which may or may not by themselves be biologically and/or pharmacologically active. For example, and without limitation, such groups may be linked to the one or more amino acid sequences of the invention so as to provide a “derivative” of an amino acid sequence or polypeptide of the invention, as further described herein.

[0189] Also within the scope of the present invention are compounds or constructs, that comprises or essentially consists of one or more derivates as described herein, and optionally further comprises one or more other groups, residues, moieties or binding units, optionally linked via one or more linkers. Preferably, said one or more other groups, residues, moieties or binding units are amino acid sequences.

[0190] In the compounds or constructs described above, the one or more amino acid sequences of the invention and the one or more groups, residues, moieties or binding units may be linked directly to each other and/or via one or more suitable linkers or spacers. For example, when the one or more groups, residues, moieties or binding units are amino acid sequences, the linkers may also be amino acid sequences, so that the resulting compound or construct is a fusion (protein) or fusion (polypeptide).

[0191] The compounds or polypeptides of the invention can generally be prepared by a method which comprises at least one step of suitably linking the one or more amino acid sequences of the invention to the one or more further groups, residues, moieties or binding units, optionally via the one or more suitable linkers, so as to provide the compound or polypeptide of the invention. Polypeptides of the invention can also be prepared by a method which generally comprises at least the steps of providing a nucleic acid that encodes a polypeptide of the invention, expressing said nucleic acid in a suitable manner, and recovering the expressed polypeptide of the invention. Such methods can be performed in a manner known per se, which will be clear to the skilled person, for example on the basis of the methods and techniques further described herein.

[0192] The process of designing/selecting and/or preparing a compound or polypeptide of the invention, starting from an amino acid sequence of the invention, is also referred to herein as “formatting” said amino acid sequence of the invention; and an amino acid of the invention that is made part of a compound or polypeptide of the invention is said to be “formatted” or to be “in the format of” said compound or polypeptide of the invention. Examples of ways in which an amino acid sequence of the invention can be formatted and examples of such formats will be clear to the skilled person based on the disclosure herein; and such formatted amino acid sequences form a further aspect of the invention.

[0193] In one specific aspect of the invention, a compound of the invention or a polypeptide of the invention may have an increased half-life, compared to the corresponding amino acid sequence of the invention. Some preferred, but non-limiting examples of such compounds and polypeptides will become clear to the skilled person based on the further disclosure herein, and for example comprise amino acid sequences or polypeptides of the invention that have been chemically modified to increase the half-life thereof (for example, by means of pegylation); amino acid sequences of the invention that comprise at least one additional binding site for binding to a serum protein (such as serum albumin); or polypeptides of the invention that comprise at least one amino acid sequence of the invention that is linked to at least one moiety (and in particular at least one amino acid sequence) that increases the half-life of the amino acid sequence of the invention. Examples of polypeptides of the invention that comprise such half-life extending moieties or amino acid sequences will become clear to the skilled person based on the further disclosure herein; and for example include, without limitation, polypeptides in which the one or more amino acid sequences of the invention are suitable linked to one or more serum proteins or fragments thereof (such as (human) serum albumin or suitable fragments thereof) or to one or more binding units that can bind to serum proteins (such as, for example, domain antibodies, amino acid sequences that are suitable for use as a domain antibody, single domain antibodies, amino acid sequences that are suitable for use as a single domain antibody, “dAb”'s, amino acid sequences that are suitable for use as a dAb, or Nanobodies can bind to serum proteins such as serum albumin (such as human serum albumin), serum immunoglobulins such as IgG, or transferrin; reference is made to the further description and references mentioned herein); polypeptides in which an amino acid sequence of the invention is linked to an Fc portion (such as a human Fc) or a suitable part or fragment thereof; or polypeptides in which the one or more amino acid sequences of the invention are suitable linked to one or more small proteins or peptides that can bind to serum proteins (such as, without limitation, the proteins and peptides described in WO 91/01743, WO 01/45746, WO 02/076489).

[0194] Generally, the compounds or polypeptides of the invention with increased half-life preferably have a half-life that is at least 1.5 times, preferably at least 2 times, such as at least 5 times, for example at least 10 times or more than 20 times, greater than the half-life of the corresponding amino acid sequence of the invention per se. For example, the compounds or polypeptides of the invention with increased half-life may have a half-life that is increased with more than 1 hours, preferably more than 2 hours, more preferably more than 6 hours, such as more than 12 hours, or even more than 24, 48 or 72 hours, compared to the corresponding amino acid sequence of the invention per se.

[0195] In a preferred, but non-limiting aspect of the invention, such compounds or polypeptides of the invention have a serum half-life that is increased with more than 1 hour, preferably more than 2 hours, more preferably more than 6 hours, such as more than 12 hours, or even more than 24, 48 or 72 hours, compared to the corresponding amino acid sequence of the invention per se.

[0196] In another preferred, but non-limiting aspect of the invention, such compounds or polypeptides of the invention exhibit a serum half-life in human of at least about 12 hours, preferably at least 24 hours, more preferably at least 48 hours, even more preferably at least 72 hours or more. For example, compounds or polypeptides of the invention may have a half-life of at least 5 days (such as about 5 to 10 days), preferably at least 9 days (such as about 9 to 14 days), more preferably at least about 10 days (such as about 10 to 15 days), or at least about 11 days (such as about 11 to 16 days), more preferably at least about 12 days (such as about 12 to 18 days or more), or more than 14 days (such as about 14 to 19 days).

[0197] In another aspect, the invention relates to a nucleic acid that encodes an amino acid sequence of the invention or a polypeptide of the invention (or a suitable fragment thereof). Such a nucleic acid will also be referred to herein as a “nucleic acid of the invention” and may for example be in the form of a genetic construct, as further described herein.

[0198] In another aspect, the invention relates to a host or host cell that expresses (or that under suitable circumstances is capable of expressing) an amino acid sequence of the invention and/or a polypeptide of the invention; and/or that contains a nucleic acid of the invention. Some preferred but non-limiting examples of such hosts or host cells will become clear from the further description herein.

[0199] The invention further relates to a product or composition containing or comprising at least one amino acid sequence of the invention (or a suitable fragment thereof), at least one polypeptide of the invention and/or at least one nucleic acid of the invention, and optionally one or more further components of such compositions known per se, i.e. depending on the intended use of the composition. Such a product or composition may for example be a pharmaceutical composition (as described herein), a veterinary composition or a product or composition for diagnostic use (as also described herein). Some preferred but non-limiting examples of such products or compositions will become clear from the further description herein.

[0200] In another specific, but non-limiting aspect, the amino acid sequences and polypeptides described herein are such that they (a) specifically bind (as defined herein) to the IL-6 receptor; and (b) are capable of downregulating the IL-6 receptor and/or are capable of inhibiting, decreasing or downregulating the signalling of the IL-6 receptor and/or the pathway(s), mechanism(s) or signalling in which the IL-6 or IL-6R is involved. As will be clear to the skilled person, such an amino acid sequence or polypeptide can generally be used as an antagonist of IL-6, of the IL-6 receptor and/or of the biological pathways, mechanisms or effects in which IL-6, Il-6R and/or Il-6/IL-6R mediated signalling is involved. Any such decrease or downregulation (which can be at least 1%, such as at least 5%, or more than 10%, or up to 50% or 100% or more in a relevant parameter, compared to the same parameter under conditions in which the amino acid sequence or polypeptide is not bound to the IL-6 receptor), may be measured in any suitable manner known per se, for example using one of the assays used in the Experimental Part and/or mentioned herein.

[0201] For example, such antagonistic amino acid sequences and polypeptides may be competitive of non-competitive inhibitors of the binding of IL-6 to IL-6R.

[0202] More in particular, and in addition to (a) and (b) above, and optionally in addition to (d) and/or (e) below, such antagonistic amino acid sequences and polypeptides may bind to IL-6R in such a way that (c) binding of IL-6 to IL-6R is blocked, inhibited or reduced; compared to the binding of IL-6 to its receptor without the presence of the amino acid sequence or Nanobody of the invention.

[0203] For example, and without limitation, such antagonistic amino acid sequences and polypeptides may bind to or close to the IL-6 om IL-6R.

[0204] Also, in addition to (a) and (b) above, and optionally in addition to (c) above or (e) below, such antagonistic amino acid sequences and polypeptides may bind to IL-6R (i.e. as such or as present in the IL-6/IL-6R complex) in such a way that (d) the formation of the IL-6/IL-6R complex is inhibited or affected (e.g. fully or partially disrupted) in such a way that the binding of the complex to—e.g. its affinity for—gp130 is reduced (or reversely, that the binding of gp 130 to—e.g. its affinity for—the complex is reduced), so that the signaling induced/mediated by the binding of the complex to gp130 is modulated (e.g. reduced); compared to the formation of the complex and its binding to gp130 without the presence of the amino acid sequence or Nanobody of the invention.

[0205] Also, in addition to (a) and (b) above, and optionally in addition to (c) or (d) above, such antagonistic amino acid sequences and polypeptides may bind to IL-6R (i.e. as such or as present in the IL-6/IL-6R complex) in such a way that (e) binding to IL-6R (i.e. as such or as present in the IL-6/IL-6R complex) in such a way that the formation of the IL-6/IL-6R complex essentially is not affected but that the binding of said complex to gp130 is modulated (e.g. inhibited), so that the signalling induced/mediated by the binding of the complex to gp130 is modulated (e.g. reduced); compared to the formation of the complex and its binding to gp 130 without the presence of the amino acid sequence or Nanobody of the invention.

[0206] Alternatively, such antagonistic amino acid sequences and polypeptides may bind to another epitope, site, domain or region on the IL-6 receptor (e.g. allosteric binding) such that the IL-6 receptor becomes less sensitive for binding of IL-6 (and/or that the signalling of the IL-6 receptor upon binding of IL-6 is reduced).

[0207] It is also possible that such antagonistic amino acid sequences and polypeptides may bind to another epitope, site, domain or region on the IL-6 receptor such that the ligand-mediated dimerization of the growth factor receptor is prevented, reduced or inhibited.

[0208] Accordingly, in the context of the present invention, “modulating” or “to modulate” generally means exercising an agonistic or antagonistic effect, respectively, with respect to IL-6, IL-6R and/or the biological pathways, responses, signalling, mechanisms or effects in which IL-6 and/or IL-6R is involved. In particular, “modulating” or “to modulate” may mean either an such an agonistic or antagonistic effect (i.e. a full or partial agonistic or antagonistic effect, respectively), as measured using a suitable in vitro, cellular or in vivo assay (such as those mentioned herein), that leads to a change in a relevant parameter by at least 1%, preferably at least 5%, such as at least 10% or at least 25%, for example by at least 50%, at least 60%, at least 70%, at least 80%, or 90% or more, compared to same parameter in the same assay under the same conditions but without the presence of the amino acid sequence, Nanobody or polypeptide of the invention.

[0209] The invention further relates to methods for preparing or generating the amino acid sequences, polypeptides, nucleic acids, host cells, products and compositions described herein. Some preferred but non-limiting examples of such methods will become clear from the further description herein.

[0210] Generally, these methods may comprise the steps of:
[0211] a) providing a set, collection or library of amino acid sequences; and
[0212] b) screening said set, collection or library of amino acid sequences for amino acid sequences that can bind to and/or have affinity for IL-6R;
   and
[0213] c) isolating the amino acid sequence(s) that can bind to and/or have affinity for IL-6R.

[0214] In such a method, the set, collection or library of amino acid sequences may be any suitable set, collection or library of amino acid sequences. For example, the set, collection or library of amino acid sequences may be a set, collection or library of immunoglobulin sequences (as described herein), such as a naïve set, collection or library of immunoglobulin sequences; a synthetic or semi-synthetic set, collection or library of immunoglobulin sequences; and/or a set, collection or library of immunoglobulin sequences that have been subjected to affinity maturation.

[0215] Also, in such a method, the set, collection or library of amino acid sequences may be a set, collection or library of heavy chain variable domains (such as V_{H} domains or V_{HH} domains) or of light chain variable domains. For example, the set, collection or library of amino acid sequences may be a set, collection or library of domain antibodies or single domain antibodies, or may be a set, collection or library of amino acid sequences that are capable of functioning as a domain antibody or single domain antibody.

[0216] In a preferred aspect of this method, the set, collection or library of amino acid sequences may be an immune set, collection or library of immunoglobulin sequences, for example derived from a mammal that has been suitably immunized with IL-6R or with a suitable antigenic determinant based thereon or derived therefrom, such as an antigenic part, fragment, region, domain, loop or other epitope thereof. In one particular aspect, said antigenic determinant may be an extracellular part, region, domain, loop or other extracellular epitope(s).

[0217] In the above methods, the set, collection or library of amino acid sequences may be displayed on a phage, phagemid, ribosome or suitable micro-organism (such as yeast), such as to facilitate screening. Suitable methods, techniques and host organisms for displaying and screening (a set, collection or library of) amino acid sequences will be clear to the person skilled in the art, for example on the basis of the further disclosure herein. Reference is also made to the review by Hoogenboom in Nature Biotechnology, 23, 9, 1105-1116 (2005).

[0218] In another aspect, the method for generating amino acid sequences comprises at least the steps of
[0219] a) providing a collection or sample of cells expressing amino acid sequences;
[0220] b) screening said collection or sample of cells for cells that express an amino acid sequence that can bind to and/or have affinity for IL-6R;
   and
[0221] c) either (i) isolating said amino acid sequence; or (ii) isolating from said cell a nucleic acid sequence that encodes said amino acid sequence, followed by expressing said amino acid sequence.

[0222] For example, when the desired amino acid sequence is an immunoglobulin sequence, the collection or sample of cells may for example be a collection or sample of B-cells. Also, in this method, the sample of cells may be derived from a mammal that has been suitably immunized with IL-6R or with a suitable antigenic determinant based thereon or derived therefrom, such as an antigenic part, fragment, region, domain, loop or other epitope thereof. In one particular aspect, said antigenic determinant may be an extracellular part, region, domain, loop or other extracellular epitope(s).

[0223] The above method may be performed in any suitable manner, as will be clear to the skilled person. Reference is for example made to EP 0 542 810, WO 05/19824, WO 04/051268 and WO 04/106377. The screening of step b) is preferably performed using a flow cytometry technique such as FACS. For this, reference is for example made to Lieby et al., Blood, Vol. 97, No. 12, 3820.

[0224] In another aspect, the method for generating an amino acid sequence directed against IL-6R may comprise at least the steps of
[0225] a) providing a set, collection or library of nucleic acid sequences encoding amino acid sequences;
[0226] b) screening said set, collection or library of nucleic acid sequences for nucleic acid sequences that encode an amino acid sequence that can bind to and/or has affinity for IL-6R;
   and
[0227] c) isolating said nucleic acid sequence, followed by expressing said amino acid sequence.

[0228] In such a method, the set, collection or library of nucleic acid sequences encoding amino acid sequences may for example be a set, collection or library of nucleic acid sequences encoding a naïve set, collection or library of immunoglobulin sequences; a set, collection or library of nucleic acid sequences encoding a synthetic or semi-synthetic set, collection or library of immunoglobulin sequences; and/or a set, collection or library of nucleic acid sequences encoding a set, collection or library of immunoglobulin sequences that have been subjected to affinity maturation.

[0229] Also, in such a method, the set, collection or library of nucleic acid sequences may encode a set, collection or library of heavy chain variable domains (such as V_{H} domains or V_{HH} domains) or of light chain variable domains. For example, the set, collection or library of nucleic acid sequences may encode a set, collection or library of domain antibodies or single domain antibodies, or a set, collection or library of amino acid sequences that are capable of functioning as a domain antibody or single domain antibody.

[0230] In a preferred aspect of this method, the set, collection or library of amino acid sequences may be an immune set, collection or library of nucleic acid sequences, for example derived from a mammal that has been suitably immunized with IL-6R or with a suitable antigenic determinant based thereon or derived therefrom, such as an antigenic part, fragment, region, domain, loop or other epitope thereof. In one particular aspect, said antigenic determinant may be an extracellular part, region, domain, loop or other extracellular epitope(s).

[0231] The set, collection or library of nucleic acid sequences may for example encode an immune set, collection or library of heavy chain variable domains or of light chain variable domains. In one specific aspect, the set, collection or library of nucleotide sequences may encode a set, collection or library of V_{HH} sequences.

[0232] In the above methods, the set, collection or library of nucleotide sequences may be displayed on a phage, phagemid, ribosome or suitable micro-organism (such as yeast), such as to facilitate screening. Suitable methods, techniques and host organisms for displaying and screening (a set, collection or library of) nucleotide sequences encoding amino acid sequences will be clear to the person skilled in the art, for example on the basis of the further disclosure herein. Reference is also made to the review by Hoogenboom in Nature Biotechnology, 23, 9, 1105-1116 (2005).

[0233] The invention also relates to amino acid sequences that are obtained by the above methods, or alternatively by a method that comprises the one of the above methods and in addition at least the steps of determining the nucleotide sequence or amino acid sequence of said immunoglobulin sequence; and of expressing or synthesizing said amino acid sequence in a manner known per se, such as by expression in a suitable host cell or host organism or by chemical synthesis.

[0234] Also, following the steps above, one or more amino acid sequences of the invention may be suitably humanized (or alternatively camelized); and/or the amino acid sequence(s) thus obtained may be linked to each other or to one or more other suitable amino acid sequences (optionally viaone or more suitable linkers) so as to provide a polypeptide of the invention. Also, a nucleic acid sequence encoding an amino acid sequence of the invention may be suitably humanized (or alternatively camelized) and suitably expressed; and/or one or more nucleic acid sequences encoding an amino acid sequence of the invention may be linked to each other or to one or more nucleic acid sequences that encode other suitable amino acid sequences (optionally via nucleotide sequences that encode one or more suitable linkers), after which the nucleotide sequence thus obtained may be suitably expressed so as to provide a polypeptide of the invention.

[0235] The invention further relates to applications and uses of the amino acid sequences, polypeptides, nucleic acids, host cells, products and compositions described herein, as well as to methods for the prevention and/or treatment for diseases and disorders associated with IL-6R. Some preferred but non-limiting applications and uses will become clear from the further description herein.

[0236] Other aspects, embodiments, advantages and applications of the invention will also become clear from the further description herein, in which the invention will be described and discussed in more detail with reference to the Nanobodies of the invention and of polypeptides of the invention comprising the same, which form some of the preferred aspects of the invention.

[0237] As will become clear from the further description herein, Nanobodies generally offer certain advantages (outlined herein) compared to “dAb's” or similar (single) domain antibodies or immunoglobulin sequences, which advantages are also provided by the Nanobodies of the invention. However, it will be clear to the skilled person that the more general aspects of the teaching below can also be applied (either directly or analogously) to other amino acid sequences of the invention.

### DETAILED DESCRIPTION OF THE INVENTION

[0238] The above and other aspects, embodiments and advantages of the invention will become clear from the further description hereinbelow, in which:
[0239] a) Unless indicated or defined otherwise, all terms used have their usual meaning in the art, which will be clear to the skilled person. Reference is for example made to the standard handbooks, such as Sambrook et al, “Molecular Cloning: A Laboratory Manual” (2nd. Ed.), Vols. 1-3, Cold Spring Harbor Laboratory Press (1989); F. Ausubel et al, eds., “Current protocols in molecular biology”, Green Publishing and Wiley Interscience, New York (1987); Lewin, “Genes II”, John Wiley & Sons, New York, N.Y., (1985); Old et al., “Principles of Gene Manipulation: An Introduction to Genetic Engineering”, 2nd edition, University of California Press, Berkeley, Calif. (1981); Roitt et al., “Immunology” (6th. Ed.), Mosby/Elsevier, Edinburgh (2001); Roitt et al., Roitt's Essential Immunology, 10^{th} Ed. Blackwell Publishing, UK (2001); and Janeway et al., “Immunobiology” (6th Ed.), Garland Science Publishing/Churchill Livingstone, New York (2005), as well as to the general background art cited herein;
[0240] b) Unless indicated otherwise, the term “immunoglobulin sequence”—whether used herein to refer to a heavy chain antibody or to a conventional 4-chain antibody—is used as a general term to include both the full-size antibody, the individual chains thereof, as well as all parts, domains or fragments thereof (including but not limited to antigen-binding domains or fragments such as V_{HH} domains or V_{H}/V_{L} domains, respectively). In addition, the term “sequence” as used herein (for example in terms like “immunoglobulin sequence”, “antibody sequence”, “variable domain sequence”, “V_{HH} sequence” or “protein sequence”), should generally be understood to include both the relevant amino acid sequence as well as nucleic acid sequences or nucleotide sequences encoding the same, unless the context requires a more limited interpretation;
[0241] c) Unless indicated otherwise, all methods, steps, techniques and manipulations that are not specifically described in detail can be performed and have been performed in a manner known per se, as will be clear to the skilled person. Reference is for example again made to the standard handbooks and the general background art mentioned herein and to the further references cited therein;
[0242] d) Amino acid residues will be indicated according to the standard three-letter or one-letter amino acid code, as mentioned in Table A-2;

TABLE A-2
one-letter and three-letter amino acid code

| | | | |
|---|---|---|---|
| Nonpolar, | Alanine | Ala | A |
| uncharged | Valine | Val | V |
| (at pH 6.0-7.0)⁽³⁾ | Leucine | Leu | L |
| | Isoleucine | Ile | I |
| | Phenylalanine | Phe | F |
| | Methionine⁽¹⁾ | Met | M |
| | Tryptophan | Trp | W |
| | Proline | Pro | P |
| Polar, | Glycine⁽²⁾ | Gly | G |
| uncharged | Serine | Ser | S |
| (at pH 6.0-7.0) | Threonine | Thr | T |
| | Cysteine | Cys | C |
| | Asparagine | Asn | N |
| | Glutamine | Gln | Q |
| | Tyrosine | Tyr | Y |
| Polar, | Lysine | Lys | K |
| charged | Arginine | Arg | R |
| (at pH 6.0-7.0) | Histidine⁽⁴⁾ | His | H |
| | Aspartate | Asp | D |
| | Glutamate | Glu | E |

Notes:
a) Sometimes also considered to be a polar uncharged amino acid.
b) Sometimes also considered to be a nonpolar uncharged amino acid.
c) As will be clear to the skilled person, the fact that an amino acid residue is referred to in this Table as being either charged or uncharged at pH 6.0 to 7.0 does not reflect in any way on the charge said amino acid residue may have at a pH lower than 6.0 and/or at a pH higher than 7.0; the amino acid residues mentioned in the Table can be either charged and/or uncharged at such a higher or lower pH, as will be clear to the skilled person.
d) As is known in the art, the charge of a His residue is greatly dependant upon even small shifts in pH, but a His residu can generally be considered essentially uncharged at a pH of about 6.5.

[0243] e) For the purposes of comparing two or more nucleotide sequences, the percentage of “sequence identity” between a first nucleotide sequence and a second nucleotide sequence may be calculated by dividing [the number of nucleotides in the first nucleotide sequence that are identical to the nucleotides at the corresponding positions in the second nucleotide sequence] by [the total number of nucleotides in the first nucleotide sequence] and multiplying by [100%], in which each deletion, insertion, substitution or addition of a nucleotide in the second nucleotide sequence—compared to the first nucleotide sequence—is considered as a difference at a single nucleotide (position).
   [0244] Alternatively, the degree of sequence identity between two or more nucleotide sequences may be calculated using a known computer algorithm for sequence alignment such as NCBI Blast v2.0, using standard settings.
   [0245] Some other techniques, computer algorithms and settings for determining the degree of sequence identity are for example described in WO 04/037999, EP 0 967 284, EP 1 085 089, WO 00/55318, WO 00/78972, WO 98/49185 and GB 2 357 768-A.
   [0246] Usually, for the purpose of determining the percentage of “sequence identity” between two nucleotide sequences in accordance with the calculation method outlined hereinabove, the nucleotide sequence with the greatest number of nucleotides will be taken as the “first” nucleotide sequence, and the other nucleotide sequence will be taken as the “second” nucleotide sequence;
[0247] f) For the purposes of comparing two or more amino acid sequences, the percentage of “sequence identity” between a first amino acid sequence and a second amino acid sequence (as referred to herein as “amino acid identity”) may be calculated by dividing [the number of amino acid residues in the first amino acid sequence that are identical to the amino acid residues at the corresponding positions in the second amino acid sequence] by [the total number of amino acid residues in the first amino acid sequence] and multiplying by [100%], in which each deletion, insertion, substitution or addition of an amino acid residue in the second amino acid sequence—compared to the first amino acid sequence—is considered as a difference at a single amino acid residue (position), i.e. as an “amino acid difference” as defined herein.
   [0248] Alternatively, the degree of sequence identity between two amino acid sequences may be calculated using a known computer algorithm, such as those mentioned above for determining the degree of sequence identity for nucleotide sequences, again using standard settings.
   [0249] Usually, for the purpose of determining the percentage of “sequence identity” between two amino acid sequences in accordance with the calculation method outlined hereinabove, the amino acid sequence with the greatest number of amino acid residues will be taken as the “first” amino acid sequence, and the other amino acid sequence will be taken as the “second” amino acid sequence.
   [0250] Also, in determining the degree of sequence identity between two amino acid sequences, the skilled person may take into account so-called “conservative” amino acid substitutions, which can generally be described as amino acid substitutions in which an amino acid residue is replaced with another amino acid residue of similar chemical structure and which has little or essentially no influence on the function, activity or other biological properties of the polypeptide. Such conservative amino acid substitutions are well known in the art, for example from WO 04/037999, GB-A-3 357 768, WO 98/49185, WO 00/46383 and WO 01/09300; and (preferred) types and/or combinations of such substitutions may be selected on the basis of the pertinent teachings from WO 04/037999 as well as WO 98/49185 and from the further references cited therein.
   [0251] Such conservative substitutions preferably are substitutions in which one amino acid within the following groups (a)-(e) is substituted by another amino acid residue within the same group: (a) small aliphatic, nonpolar or slightly polar residues: Ala, Ser, Thr, Pro and Gly; (b) polar, negatively charged residues and their (uncharged) amides: Asp, Asn, Glu and Gln; (c) polar, positively charged residues: His, Arg and Lys; (d) large aliphatic, nonpolar residues: Met, Leu, Ile, Val and Cys; and (e) aromatic residues: Phe, Tyr and Trp.
   [0252] Particularly preferred conservative substitutions are as follows: Ala into Gly or into Ser; Arg into Lys; Asn into Gln or into His; Asp into Glu; Cys into Ser; Gln into Asn; Glu into Asp; Gly into Ala or into Pro; His into Asn or into Gln; Ile into Leu or into Val; Leu into Ile or into Val; Lys into Arg, into Gln or into Glu; Met into Leu, into Tyr or into Ile; Phe into Met, into Leu or into Tyr; Ser into Thr; Thr into Ser; Trp into Tyr; Tyr into Trp; and/or Phe into Val, into Ile or into Leu.
   [0253] Any amino acid substitutions applied to the polypeptides described herein may also be based on the analysis of the frequencies of amino acid variations between homologous proteins of different species developed by Schulz et al., Principles of Protein Structure, Springer-Verlag, 1978, on the analyses of structure forming potentials developed by Chou and Fasman, Biochemistry 13: 211, 1974 and Adv. Enzymol., 47: 45-149, 1978, and on the analysis of hydrophobicity patterns in proteins developed by Eisenberg et al., Proc. Nad. Acad. Sci. USA 81: 140-144, 1984; Kyte & Doolittle; J Molec. Biol. 157: 105-132, 198 1, and Goldman et al., Ann. Rev. Biophys. Chem. 15: 321-353, 1986, all incorporated herein in their entirety by reference. Information on the primary, secondary and tertiary structure of Nanobodies is given in the description herein and in the general background art cited above. Also, for this purpose, the crystal structure of a V_{HH} domain from a llama is for example given by Desmyter et al., Nature Structural Biology, Vol. 3, 9, 803 (1996); Spinelli et al., Natural Structural Biology (1996); 3, 752-757; and Decanniere et al., Structure, Vol. 7, 4, 361 (1999). Further information about some of the amino acid residues that in conventional V_{H} domains form the V_{H}/V_{L} interface and potential camelizing substitutions on these positions can be found in the prior art cited above.
[0254] g) Amino acid sequences and nucleic acid sequences are said to be “exactly the same” if they have 100% sequence identity (as defined herein) over their entire length;
[0255] h) When comparing two amino acid sequences, the term “amino acid difference” refers to an insertion, deletion or substitution of a single amino acid residue on a position of the first sequence, compared to the second sequence; it being understood that two amino acid sequences can contain one, two or more such amino acid differences;
[0256] i) When a nucleotide sequence or amino acid sequence is said to “comprise” another nucleotide sequence or amino acid sequence, respectively, or to “essentially consist of” another nucleotide sequence or amino acid sequence, this may mean that the latter nucleotide sequence or amino acid sequence has been incorporated into the firstmentioned nucleotide sequence or amino acid sequence, respectively, but more usually this generally means that the firstmentioned nucleotide sequence or amino acid sequence comprises within its sequence a stretch of nucleotides or amino acid residues, respectively, that has the same nucleotide sequence or amino acid sequence, respectively, as the latter sequence, irrespective of how the firstmentioned sequence has actually been generated or obtained (which may for example be by any suitable method described herein). By means of a non-limiting example, when a Nanobody of the invention is said to comprise a CDR sequence, this may mean that said CDR sequence has been incorporated into the Nanobody of the invention, but more usually this generally means that the Nanobody of the invention contains within its sequence a stretch of amino acid residues with the same amino acid sequence as said CDR sequence, irrespective of how said Nanobody of the invention has been generated or obtained. It should also be noted that when the latter amino acid sequence has a specific biological or structural function, it preferably has essentially the same, a similar or an equivalent biological or structural function in the firstmentioned amino acid sequence (in other words, the firstmentioned amino acid sequence is preferably such that the latter sequence is capable of performing essentially the same, a similar or an equivalent biological or structural function). For example, when a Nanobody of the invention is said to comprise a CDR sequence or framework sequence, respectively, the CDR sequence and framework are preferably capable, in said Nanobody, of functioning as a CDR sequence or framework sequence, respectively. Also, when a nucleotide sequence is said to comprise another nucleotide sequence, the firstmentioned nucleotide sequence is preferably such that, when it is expressed into an expression product (e.g. a polypeptide), the amino acid sequence encoded by the latter nucleotide sequence forms part of said expression product (in other words, that the latter nucleotide sequence is in the same reading frame as the firstmentioned, larger nucleotide sequence).
[0257] j) A nucleic acid sequence or amino acid sequence is considered to be “(in) essentially isolated (form)”—for example, compared to its native biological source and/or the reaction medium or cultivation medium from which it has been obtained—when it has been separated from at least one other component with which it is usually associated in said source or medium, such as another nucleic acid, another protein/polypeptide, another biological component or macromolecule or at least one contaminant, impurity or minor component. In particular, a nucleic acid sequence or amino acid sequence is considered “essentially isolated” when it has been purified at least 2-fold, in particular at least 10-fold, more in particular at least 100-fold, and up to 1000-fold or more. A nucleic acid sequence or amino acid sequence that is “in essentially isolated form” is preferably essentially homogeneous, as determined using a suitable technique, such as a suitable chromatographical technique, such as polyacrylamide-gel electrophoresis;
[0258] k) The term “domain” as used herein generally refers to a globular region of an antibody chain, and in particular to a globular region of a heavy chain antibody, or to a polypeptide that essentially consists of such a globular region. Usually, such a domain will comprise peptide loops (for example 3 or 4 peptide loops) stabilized, for example, as a sheet or by disulfide bonds.
[0259] l) The term ‘antigenic determinant’ refers to the epitope on the antigen recognized by the antigen-binding molecule (such as a Nanobody or a polypeptide of the invention) and more in particular by the antigen-binding site of said molecule. The terms “antigenic determinant” and “epitope' may also be used interchangeably herein.
[0260] m) An amino acid sequence (such as a Nanobody, an antibody, a polypeptide of the invention, or generally an antigen binding protein or polypeptide or a fragment thereof) that can (specifically) bind to, that has affinity for and/or that has specificity for a specific antigenic determinant, epitope, antigen or protein (or for at least one part, fragment or epitope thereof) is said to be “against” or “directed against” said antigenic determinant, epitope, antigen or protein. In particular, an amino acid sequence that “against” or “directed against” an antigenic determinant, epitope, antigen or protein (or for at least one part, fragment or epitope thereof) and/or that can specifically bind to, that has affinity for and/or that has specificity for a specific antigenic determinant, epitope, antigen or protein (or for at least one part, fragment or epitope thereof) is defined herein as an amino acid sequence that can bind to said antigenic determinant, epitope, antigen or protein (or for at least one part, fragment or epitope thereof) with a dissociation constant (K_{D}) of 10⁻⁵ to 10⁴² moles/liter or less, and preferably 10⁻⁷ to 10⁻¹² moles/liter or less and more preferably 10⁻⁸ to 10⁻¹² moles/liter (i.e. with an association constant (K_{A}) of 10⁵ to 10¹² liter/moles or more, and preferably 10⁷ to 10¹² liter/moles or more and more preferably 10⁸ to 10¹² liter/moles).
[0261] n) The term “specificity” refers to the number of different types of antigens or antigenic determinants to which a particular antigen-binding molecule or antigen-binding protein (such as a Nanobody or a polypeptide of the invention) molecule can bind. The specificity of an antigen-binding protein can be determined based on affinity and/or avidity. The affinity, represented by the equilibrium constant for the dissociation of an antigen with an antigen-binding protein (K_{D}), is a measure for the binding strength between an antigenic determinant and an antigen-binding site on the antigen-binding protein: the lesser the value of the K_{D}, the stronger the binding strength between an antigenic determinant and the antigen-binding molecule (alternatively, the affinity can also be expressed as the affinity constant (K_{A}), which is 1/K_{D}). As will be clear to the skilled person (for example on the basis of the further disclosure herein), affinity can be determined in a manner known per se, depending on the specific antigen of interest. Avidity is the measure of the strength of binding between an antigen-binding molecule (such as a Nanobody or polypeptide of the invention) and the pertinent antigen. Avidity is related to both the affinity between an antigenic determinant and its antigen binding site on the antigen-binding molecule and the number of pertinent binding sites present on the antigen-binding molecule. Typically, antigen-binding proteins (such as the amino acid sequences, Nanobodies and/or polypeptides of the invention) will bind to their antigen with a dissociation constant (K_{D}) of 10⁻⁵ to 10⁻¹² moles/liter or less, and preferably 10⁻⁷ to 10⁻¹² moles/liter or less and more preferably 10⁻⁸ to 10⁻¹² moles/liter (i.e. with an association constant (K_{A}) of 10⁵ to 10¹² liter/moles or more, and preferably 10⁷ to 10¹² liter/moles or more and more preferably 10⁸ to 10¹² liter/moles). Any K_{D} value greater than 10⁴ mol/liter (or any K_{A} value lower than 10⁴ M⁻¹) liters/mol is generally considered to indicate non-specific binding. Preferably, a monovalent immunoglobulin sequence of the invention will bind to the desired serum protein with an affinity less than 500 nM, preferably less than 200 nM, more preferably less than 10 nM, such as less than 500 pM. Specific binding of an antigen-binding protein to an antigen or antigenic determinant can be determined in any suitable manner known per se, including, for example, Scatchard analysis and/or competitive binding assays, such as radioimmunoassays (RIA), enzyme immunoassays (EIA) and sandwich competition assays, and the different variants thereof known per se in the art; as well as the other techniques mentioned herein.
   [0262] The dissociation constant may be the actual or apparent dissociation constant, as will be clear to the skilled person. Methods for determining the dissociation constant will be clear to the skilled person, and for example include the techniques mentioned herein. In this respect, it will also be clear that it may not be possible to measure dissociation constants of more then 10⁴ moles/liter or 10³ moles/liter (e.g. of 10² moles/liter). Optionally, as will also be clear to the skilled person, the (actual or apparent) dissociation constant may be calculated on the basis of the (actual or apparent) association constant (K_{A}), by means of the relationship [K_{D}=1/K_{A}].

[0263] The affinity denotes the strength or stability of a molecular interaction. The affinity is commonly given as by the K_{D}, or dissociation constant, which has units of mol/liter (or M). The affinity can also be expressed as an association constant, K_{A}, which equals 1/K_{D} and has units of (mol/liter)⁻¹ (or M⁻¹). In the present specification, the stability of the interaction between two molecules (such as an amino acid sequence, Nanobody or polypeptide of the invention and its intended target) will mainly be expressed in terms of the K_{D} value of their interaction; it being clear to the skilled person that in view of the relation K_{A}=1/K_{D}, specifying the strength of molecular interaction by its K_{D} value can also be used to calculate the corresponding K_{A} value. The K_{D}-value characterizes the strength of a molecular interaction also in a thermodynamic sense as it is related to the free energy (DG) of binding by the well known relation DG=RT·ln(K_{D}) (equivalently DG=−RT·ln(K_{A})), where R equals the gas constant, T equals the absolute temperature and In denotes the natural logarithm.
[0264] The K_{D} for biological interactions which are considered meaningful (e.g. specific) are typically in the range of 10⁻¹⁰M (0.1 nM) to 10⁻⁵M (10000 nM). The stronger an interaction is, the lower is its K_{D}.
[0265] The K_{D} can also be expressed as the ratio of the dissociation rate constant of a complex, denoted as k_{off}, to the rate of its association, denoted kₒₙ (so that K_{D}=k_{off}/kₒₙ and K_{A}=kₒₙ/k_{off}). The off-rate k_{off} has units s⁻¹ (where s is the SI unit notation of second). The on-rate kₒₙ has units M⁻¹s⁻¹. The on-rate may vary between 10² M⁻¹s⁻¹ to about 10⁷ M⁻¹s⁻¹, approaching the diffusion-limited association rate constant for bimolecular interactions. The off-rate is related to the half-life of a given molecular interaction by the relation t_{1/2}=ln(2)/k_{off}. The off-rate may vary between 10⁻⁶ s−1 (near irreversible complex with a t_{1/2} of multiple days) to 1 s⁻¹ (t_{1/2}=0.69 s).
[0266] The affinity of a molecular interaction between two molecules can be measured via different techniques known per se, such as the well the known surface plasmon resonance (SPR) biosensor technique (see for example Ober et al., Intern. Immunology, 13, 1551-1559, 2001) where one molecule is immobilized on the biosensor chip and the other molecule is passed over the immobilized molecule under flow conditions yielding kₒₙ, k_{off} measurements and hence K_{D} (or K_{A}) values. This can for example be performed using the well-known BIACORE instruments.
[0267] It will also be clear to the skilled person that the measured K_{D} may correspond to the apparent K_{D} if the measuring process somehow influences the intrinsic binding affinity of the implied molecules for example by artifacts related to the coating on the biosensor of one molecule. Also, an apparent K_{D} may be measured if one molecule contains more than one recognition sites for the other molecule. In such situation the measured affinity may be affected by the avidity of the interaction by the two molecules.
[0268] Another approach that may be used to assess affinity is the 2-step ELISA (Enzyme, Linked Immunosorbent Assay) procedure of Friguet et al. (J. Immunol. Methods, 77, 305-19, 1985). This method establishes a solution phase binding equilibrium measurement and avoids possible artifacts relating to adsorption of one of the molecules on a support such as plastic.
[0269] However, the accurate measurement of K_{D} may be quite labor-intensive and as consequence, often apparent K_{D} values are determined to assess the binding strength of two molecules. It should be noted that as long all measurements are made in a consistent way (e.g. keeping the assay conditions unchanged) apparent K_{D} measurements can be used as an approximation of the true K_{D} and hence in the present document K_{D} and apparent K_{D} should be treated with equal importance or relevance.
[0270] Finally, it should be noted that in many situations the experienced scientist may judge it to be convenient to determine the binding affinity relative to some reference molecule. For example, to assess the binding strength between molecules A and B, one may e.g. use a reference molecule C that is known to bind to B and that is suitably labeled with a fluorophore or chromophore group or other chemical moiety, such as biotin for easy detection in an ELISA or FACS (Fluorescent activated cell sorting) or other format (the fluorophore for fluorescence detection, the chromophore for light absorption detection, the biotin for streptavidin-mediated ELISA detection). Typically, the reference molecule C is kept at a fixed concentration and the concentration of A is varied for a given concentration or amount of B. As a result an IC₅₀ value is obtained corresponding to the concentration of A at which the signal measured for C in absence of A is halved. Provided K_{D ref}, the K_{D} of the reference molecule, is known, as well as the total concentration c_{ref} of the reference molecule, the apparent K_{D} for the interaction A-B can be obtained from following formula: K_{D}=IC₅₀/(1+c_{ref}/K_{D ref}). Note that if cref<<K_{D} ref, K_{D}≈IC₅₀. Provided the measurement of the IC₅₀ is performed in a consistent way (e.g. keeping c_{ref} fixed) for the binders that are compared, the strength or stability of a molecular interaction can be assessed by the IC₅₀ and this measurement is judged as equivalent to K_{D} or to apparent K_{D} throughout this text.
[0271] o) The half-life of an amino acid sequence, compound or polypeptide of the invention can generally be defined as the time taken for the serum concentration of the amino acid sequence, compound or polypeptide to be reduced by 50%, in vivo, for example due to degradation of the sequence or compound and/or clearance or sequestration of the sequence or compound by natural mechanisms. The in vivo half-life of an amino acid sequence, compound or polypeptide of the invention can be determined in any manner known per se, such as by pharmacokinetic analysis. Suitable techniques will be clear to the person skilled in the art, and may for example generally involve the steps of suitably administering to a warm-blooded animal (i.e. to a human or to another suitable mammal, such as a mouse, rabbit, rat, pig, dog or a primate, for example monkeys from the genus Macaca (such as, and in particular, cynomologus monkeys (Macaca fascicularis) and/or rhesus monkeys (Macaca mulatta)) and baboon (Papio ursinus)) a suitable dose of the amino acid sequence, compound or polypeptide of the invention; collecting blood samples or other samples from said animal; determining the level or concentration of the amino acid sequence, compound or polypeptide of the invention in said blood sample; and calculating, from (a plot of) the data thus obtained, the time until the level or concentration of the amino acid sequence, compound or polypeptide of the invention has been reduced by 50% compared to the initial level upon dosing. Reference is for example made to the Experimental Part below, as well as to the standard handbooks, such as Kenneth, A et al: Chemical Stability of Pharmaceuticals: A Handbook for Pharmacists and Peters et al, Pharmacokinete analysis: A Practical Approach (1996). Reference is also made to “Pharmacokinetics”, M Gibaldi & D Perron, published by Marcel Dekker, 2nd Rev. edition (1982).
   [0272] As will also be clear to the skilled person (see for example pages 6 and 7 of WO 04/003019 and in the further references cited therein), the half-life can be expressed using parameters such as the t½-alpha, t½-beta and the area under the curve (AUC). In the present specification, an “increase in half-life” refers to an increase in any one of these parameters, such as any two of these parameters, or essentially all three these parameters. As used herein “increase in half-life” or “increased half-life” in particular refers to an increase in the t½-beta, either with or without an increase in the t½-alpha and/or the AUC or both.
[0273] p) As also further described herein, the total number of amino acid residues in a Nanobody can be in the region of 110-120, is preferably 112-115, and is most preferably 113. It should however be noted that parts, fragments, analogs or derivatives (as further described herein) of a Nanobody are not particularly limited as to their length and/or size, as long as such parts, fragments, analogs or derivatives meet the further requirements outlined herein and are also preferably suitable for the purposes described herein;
[0274] q) The amino acid residues of a Nanobody are numbered according to the general numbering for V_{H} domains given by Kabat et al. (“Sequence of proteins of immunological interest”, US Public Health Services, NIH Bethesda, Md., Publication No. 91), as applied to V_{HH} domains from Camelids in the article of Riechmann and Muyldermans, J. Immunol. Methods 2000 Jun. 23; 240 (1-2):185-195 (see for example FIG. 2 of said article or referred to herein. According to this numbering, FR1 of a Nanobody comprises the amino acid residues at positions 1-30, CDR1 of a Nanobody comprises the amino acid residues at positions 31-35, FR2 of a Nanobody comprises the amino acids at positions 36-49, CDR2 of a Nanobody comprises the amino acid residues at positions 50-65, FR3 of a Nanobody comprises the amino acid residues at positions 66-94, CDR3 of a Nanobody comprises the amino acid residues at positions 95-102, and FR4 of a Nanobody comprises the amino acid residues at positions 103-113. [In this respect, it should be noted that—as is well known in the art for V_{H} domains and for V_{HH} domains—the total number of amino acid residues in each of the CDR's may vary and may not correspond to the total number of amino acid residues indicated by the Kabat numbering (that is, one or more positions according to the Kabat numbering may not be occupied in the actual sequence, or the actual sequence may contain more amino acid residues than the number allowed for by the Kabat numbering). This means that, generally, the numbering according to Kabat may or may not correspond to the actual numbering of the amino acid residues in the actual sequence. Generally, however, it can be said that, according to the numbering of Kabat and irrespective of the number of amino acid residues in the CDR's, position 1 according to the Kabat numbering corresponds to the start of FR1 and vice versa, position 36 according to the Kabat numbering corresponds to the start of FR2 and vice versa, position 66 according to the Kabat numbering corresponds to the start of FR3 and vice versa, and position 103 according to the Kabat numbering corresponds to the start of FR4 and vice versa.]. Alternative methods for numbering the amino acid residues of V_{H} domains, which methods can also be applied in an analogous manner to V_{HH} domains from Camelids and to Nanobodies, are the method described by Chothia et al. (Nature 342, 877-883 (1989)), the so-called “AbM definition” and the so-called “contact definition”. However, in the present description, claims and figures, the numbering according to Kabat as applied to V_{HH} domains by Riechmann and Muyldermans will be followed, unless indicated otherwise; and
[0275] r) The Figures, Sequence Listing and the Experimental Part/Examples are only given to further illustrate the invention and should not be interpreted or construed as limiting the scope of the invention and/or of the appended claims in any way, unless explicitly indicated otherwise herein.

[0276] For a general description of heavy chain antibodies and the variable domains thereof, reference is inter alia made to the prior art cited herein, to the review article by Muyldermans in Reviews in Molecular Biotechnology 74 (2001), 277-302; as well as to the following patent applications, which are mentioned as general background art: WO 94/04678, WO 95/04079 and WO 96/34103 of the Vrije Universiteit Brussel; WO 94/25591, WO 99/37681, WO 00/40968, WO 00/43507, WO 00/65057, WO 01/40310, WO 01/44301, EP 1134231 and WO 02/48193 of Unilever; WO 97/49805, WO 01/21817, WO 03/035694, WO 03/054016 and WO 03/055527 of the Vlaams Instituut voor Biotechnologie (VIB); WO 03/050531 of Algonomics N.V. and Ablynx N.V.; WO 01/90190 by the National Research Council of Canada; WO 03/025020 (=EP 1 433 793) by the Institute of Antibodies; as well as WO 04/041867, WO 04/041862, WO 04/041865, WO 04/041863, WO 04/062551, WO 05/044858, WO 06/40153, WO 06/079372, WO 06/122786, WO 06/122787 and WO 06/122825, by Ablynx N.V. and the further published patent applications by Ablynx N.V. Reference is also made to the further prior art mentioned in these applications, and in particular to the list of references mentioned on pages 41-43 of the International application WO 06/040153, which list and references are incorporated herein by reference.

[0277] In accordance with the terminology used in the above references, the variable domains present in naturally occurring heavy chain antibodies will also be referred to as “V_{HH} domains”, in order to distinguish them from the heavy chain variable domains that are present in conventional 4-chain antibodies (which will be referred to hereinbelow as “V_{H} domains”) and from the light chain variable domains that are present in conventional 4-chain antibodies (which will be referred to hereinbelow as “V_{L} domains”).

[0278] As mentioned in the prior art referred to above, V_{HH} domains have a number of unique structural characteristics and functional properties which make isolated V_{HH} domains (as well as Nanobodies based thereon, which share these structural characteristics and functional properties with the naturally occurring V_{HH} domains) and proteins containing the same highly advantageous for use as functional antigen-binding domains or proteins. In particular, and without being limited thereto, V_{HH} domains (which have been “designed” by nature to functionally bind to an antigen without the presence of, and without any interaction with, a light chain variable domain) and Nanobodies can function as a single, relatively small, functional antigen-binding structural unit, domain or protein. This distinguishes the V_{HH} domains from the V_{H} and V_{L} domains of conventional 4-chain antibodies, which by themselves are generally not suited for practical application as single antigen-binding proteins or domains, but need to be combined in some form or another to provide a functional antigen-binding unit (as in for example conventional antibody fragments such as Fab fragments; in ScFv's fragments, which consist of a V_{H} domain covalently linked to a V_{L} domain).

[0279] Because of these unique properties, the use of V_{HH} domains and Nanobodies as single antigen-binding proteins or as antigen-binding domains (i.e. as part of a larger protein or polypeptide) offers a number of significant advantages over the use of conventional V_{H} and V_{L} domains, scFv's or conventional antibody fragments (such as Fab- or F(ab′)₂-fragments):
[0280] only a single domain is required to bind an antigen with high affinity and with high selectivity, so that there is no need to have two separate domains present, nor to assure that these two domains are present in the right spacial conformation and configuration (i.e. through the use of especially designed linkers, as with scFv's);
[0281] V_{HH} domains and Nanobodies can be expressed from a single gene and require no post-translational folding or modifications;
[0282] V_{HH} domains and Nanobodies can easily be engineered into multivalent and multispecific formats (as further discussed herein);
[0283] V_{HH} domains and Nanobodies are highly soluble and do not have a tendency to aggregate (as with the mouse-derived antigen-binding domains described by Ward et al., Nature, Vol. 341, 1989, p. 544);
[0284] V_{HH} domains and Nanobodies are highly stable to heat, pH, proteases and other denaturing agents or conditions (see for example Ewert et al, supra);
[0285] V_{HH} domains and Nanobodies are easy and relatively cheap to prepare, even on a scale required for production. For example, V_{HH} domains, Nanobodies and proteins/polypeptides containing the same can be produced using microbial fermentation (e.g. as further described below) and do not require the use of mammalian expression systems, as with for example conventional antibody fragments;
[0286] V_{HH} domains and Nanobodies are relatively small (approximately 15 kDa, or 10 times smaller than a conventional IgG) compared to conventional 4-chain antibodies and antigen-binding fragments thereof, and therefore show high(er) penetration into tissues (including but not limited to solid tumors and other dense tissues) than such conventional 4-chain antibodies and antigen-binding fragments thereof;
[0287] V_{HH} domains and Nanobodies can show so-called cavity-binding properties (inter alia due to their extended CDR3 loop, compared to conventional V_{H} domains) and can therefore also access targets and epitopes not accessible to conventional 4-chain antibodies and antigen-binding fragments thereof. For example, it has been shown that V_{HH} domains and Nanobodies can inhibit enzymes (see for example WO 97/49805; Transue et al., (1998), supra; Lauwereys et al., (1998), supra.

[0288] As mentioned above, the invention generally relates to Nanobodies directed against the IL-6 receptor, as well as to polypeptides comprising or essentially consisting of one or more of such Nanobodies, that can be used for the prophylactic, therapeutic and/or diagnostic purposes described herein.

[0289] As also further described herein, the invention further relates to nucleic acids encoding such Nanobodies and polypeptides, to methods for preparing such Nanobodies and polypeptides, to host cells expressing or capable of expressing such Nanobodies or polypeptides, to compositions comprising such Nanobodies, polypeptides, nucleic acids or host cells, and to uses of such Nanobodies, polypeptides, nucleic acids, host cells or compositions.

[0290] Generally, it should be noted that the term Nanobody as used herein in its broadest sense is not limited to a specific biological source or to a specific method of preparation. For example, as will be discussed in more detail below, the Nanobodies of the invention can generally be obtained: (1) by isolating the V_{HH} domain of a naturally occurring heavy chain antibody; (2) by expression of a nucleotide sequence encoding a naturally occurring V_{HH} domain; (3) by “humanization” (as described herein) of a naturally occurring V_{HH} domain or by expression of a nucleic acid encoding a such humanized V_{HH} domain; (4) by “camelization” (as described herein) of a naturally occurring V_{H} domain from any animal species, and in particular a from species of mammal, such as from a human being, or by expression of a nucleic acid encoding such a camelized V_{H} domain; (5) by “camelisation” of a “domain antibody” or “Dab” as described by Ward et al (supra), or by expression of a nucleic acid encoding such a camelized V_{H} domain; (6) by using synthetic or semi-synthetic techniques for preparing proteins, polypeptides or other amino acid sequences known per se; (7) by preparing a nucleic acid encoding a Nanobody using techniques for nucleic acid synthesis known per se, followed by expression of the nucleic acid thus obtained; and/or (8) by any combination of one or more of the foregoing. Suitable methods and techniques for performing the foregoing will be clear to the skilled person based on the disclosure herein and for example include the methods and techniques described in more detail herein.

[0291] One preferred class of Nanobodies corresponds to the V_{HH} domains of naturally occurring heavy chain antibodies directed against the IL-6 receptor. As further described herein, such V_{HH} sequences can generally be generated or obtained by suitably immunizing a species of Camelid with the IL-6 receptor (i.e. so as to raise an immune response and/or heavy chain antibodies directed against the IL-6 receptor), by obtaining a suitable biological sample from said Camelid (such as a blood sample, serum sample or sample of B-cells), and by generating V_{HH} sequences directed against the IL-6 receptor, starting from said sample, using any suitable technique known per se. Such techniques will be clear to the skilled person and/or are further described herein.

[0292] Alternatively, such naturally occurring V_{HH} domains against the IL-6 receptor, can be obtained from naïve libraries of Camelid V_{HH} sequences, for example by screening such a library using the IL-6 receptor, or at least one part, fragment, antigenic determinant or epitope thereof using one or more screening techniques known per se. Such libraries and techniques are for example described in WO 99/37681, WO 01/90190, WO 03/025020 and WO 03/035694. Alternatively, improved synthetic or semi-synthetic libraries derived from naïve V_{HH} libraries may be used, such as V_{HH} libraries obtained from naïve V_{HH} libraries by techniques such as random mutagenesis and/or CDR shuffling, as for example described in WO 00/43507.

[0293] Yet another technique for obtaining V_{HH} sequences directed against the IL-6 receptor, involves suitably immunizing a transgenic mammal that is capable of expressing heavy chain antibodies (i.e. so as to raise an immune response and/or heavy chain antibodies directed against the IL-6 receptor), obtaining a suitable biological sample from said transgenic mammal (such as a blood sample, serum sample or sample of B-cells), and then generating V_{HH} sequences directed against The IL-6 receptor, starting from said sample, using any suitable technique known per se. For example, for this purpose, the heavy chain antibody-expressing mice and the further methods and techniques described in WO 02/085945, WO 04/049794, WO 06/008548 and Janssens et al., Proc. Natl. Acad. Sci. USA. 2006 Oct. 10; 103(41):15130-5 can be used.

[0294] A particularly preferred class of Nanobodies of the invention comprises Nanobodies with an amino acid sequence that corresponds to the amino acid sequence of a naturally occurring V_{HH} domain, but that has been “humanized”, i.e. by replacing one or more amino acid residues in the amino acid sequence of said naturally occurring V_{HH} sequence (and in particular in the framework sequences) by one or more of the amino acid residues that occur at the corresponding position(s) in a V_{H} domain from a conventional 4-chain antibody from a human being (e.g. indicated above). This can be performed in a manner known per se, which will be clear to the skilled person, for example on the basis of the further description herein and the prior art on humanization referred to herein. Again, it should be noted that such humanized Nanobodies of the invention can be obtained in any suitable manner known per se (i.e. as indicated under points (1)-(8) above) and thus are not strictly limited to polypeptides that have been obtained using a polypeptide that comprises a naturally occurring V_{HH} domain as a starting material.

[0295] Another particularly preferred class of Nanobodies of the invention comprises Nanobodies with an amino acid sequence that corresponds to the amino acid sequence of a naturally occurring V_{H} domain, but that has been “camelized”, i.e. by replacing one or more amino acid residues in the amino acid sequence of a naturally occurring V_{H} domain from a conventional 4-chain antibody by one or more of the amino acid residues that occur at the corresponding position(s) in a V_{HH} domain of a heavy chain antibody. This can be performed in a manner known per se, which will be clear to the skilled person, for example on the basis of the further description herein. Such “camelizing” substitutions are preferably inserted at amino acid positions that form and/or are present at the V_{H}-V_{L} interface, and/or at the so-called Camelidae hallmark residues, as defined herein (see for example WO 94/04678 and Davies and Riechmann (1994 and 1996), supra). Preferably, the V_{H} sequence that is used as a starting material or starting point for generating or designing the camelized Nanobody is preferably a V_{H} sequence from a mammal, more preferably the V_{H} sequence of a human being, such as a V_{H}3 sequence. However, it should be noted that such camelized Nanobodies of the invention can be obtained in any suitable manner known per se (i.e. as indicated under points (1)-(8) above) and thus are not strictly limited to polypeptides that have been obtained using a polypeptide that comprises a naturally occurring V_{H} domain as a starting material.

[0296] For example, again as further described herein, both “humanization” and “camelization” can be performed by providing a nucleotide sequence that encodes a naturally occurring V_{HH} domain or V_{H} domain, respectively, and then changing, in a manner known per se, one or more codons in said nucleotide sequence in such a way that the new nucleotide sequence encodes a “humanized” or “camelized” Nanobody of the invention, respectively. This nucleic acid can then be expressed in a manner known per se, so as to provide the desired Nanobody of the invention. Alternatively, based on the amino acid sequence of a naturally occurring V_{HH} domain or V_{H} domain, respectively, the amino acid sequence of the desired humanized or camelized Nanobody of the invention, respectively, can be designed and then synthesized de novo using techniques for peptide synthesis known per se. Also, based on the amino acid sequence or nucleotide sequence of a naturally occurring V_{HH} domain or V_{H} domain, respectively, a nucleotide sequence encoding the desired humanized or camelized Nanobody of the invention, respectively, can be designed and then synthesized de novo using techniques for nucleic acid synthesis known per se, after which the nucleic acid thus obtained can be expressed in a manner known per se, so as to provide the desired Nanobody of the invention.

[0297] Other suitable methods and techniques for obtaining the Nanobodies of the invention and/or nucleic acids encoding the same, starting from naturally occurring V_{H} sequences or preferably V_{HH} sequences, will be clear from the skilled person, and may for example comprise combining one or more parts of one or more naturally occurring V_{H} sequences (such as one or more FR sequences and/or CDR sequences), one or more parts of one or more naturally occurring V_{HH} sequences (such as one or more FR sequences or CDR sequences), and/or one or more synthetic or semi-synthetic sequences, in a suitable manner, so as to provide a Nanobody of the invention or a nucleotide sequence or nucleic acid encoding the same.

[0298] Optionally, a Nanobody of the invention may also, and in addition to the at least one binding site for binding against IL-6R, contain one or more further binding sites for binding against other antigens, proteins or targets. For methods and positions for introducing such second binding sites, reference is for example made to Keck and Huston, Biophysical Journal, 71, October 1996, 2002-2011; EP 0 640 130; WO 06/07260 and the US provisional application by Ablynx N.V. entitled “Immunoglobulin domains with multiple binding sites” filed on Nov. 27, 2006.

[0299] According to one preferred, but non-limiting aspect of the invention, a Nanobody in its broadest sense can be generally defined as a polypeptide comprising:
[0300] a) an amino acid sequence that is comprised of four framework regions/sequences interrupted by three complementarity determining regions/sequences, in which the amino acid residue at position 108 according to the Kabat numbering is Q;
   and/or:
[0301] b) an amino acid sequence that is comprised of four framework regions/sequences interrupted by three complementarity determining regions/sequences, in which the amino acid residue at position 45 according to the Kabat numbering is a charged amino acid (as defined herein) or a cysteine residue, and position 44 is preferably an E;
   and/or:
[0302] c) an amino acid sequence that is comprised of four framework regions/sequences interrupted by three complementarity determining regions/sequences, in which the amino acid residue at position 103 according to the Kabat numbering is chosen from the group consisting of P, R and S, and is in particular chosen from the group consisting of R and S.

[0303] Thus, in a first preferred, but non-limiting aspect, a Nanobody of the invention may have the structure

[0304] FR1-CDR1-FR2-CDR2-FR3-CDR3-FR4

[0305] in which FR1 to FR4 refer to framework regions 1 to 4, respectively, and in which CDR1 to CDR3 refer to the complementarity determining regions 1 to 3, respectively, and in which
[0306] a) the amino acid residue at position 108 according to the Kabat numbering is Q;
   and/or in which:
[0307] b) the amino acid residue at position 45 according to the Kabat numbering is a charged amino acid or a cysteine and the amino acid residue at position 44 according to the Kabat numbering is preferably E;
   and/or in which:
[0308] c) the amino acid residue at position 103 according to the Kabat numbering is chosen from the group consisting of P, R and S, and is in particular chosen from the group consisting of R and S;
   and in which:
[0309] d) CDR1, CDR2 and CDR3 are as defined herein, and are preferably as defined according to one of the preferred embodiments herein, and are more preferably as defined according to one of the more preferred embodiments herein.

[0310] In particular, a Nanobody in its broadest sense can be generally defined as a polypeptide comprising:
[0311] a) an amino acid sequence that is comprised of four framework regions/sequences interrupted by three complementarity determining regions/sequences, in which the amino acid residue at position 108 according to the Kabat numbering is Q;
   and/or:
[0312] b) an amino acid sequence that is comprised of four framework regions/sequences interrupted by three complementarity determining regions/sequences, in which the amino acid residue at position 44 according to the Kabat numbering is E and in which the amino acid residue at position 45 according to the Kabat numbering is an R;
   and/or:
[0313] c) an amino acid sequence that is comprised of four framework regions/sequences interrupted by three complementarity determining regions/sequences, in which the amino acid residue at position 103 according to the Kabat numbering is chosen from the group consisting of P, R and S, and is in particular chosen from the group consisting of R and S.

[0314] Thus, according to a preferred, but non-limiting aspect, a Nanobody of the invention may have the structure

[0315] FR1-CDR1-FR2-CDR2-FR3-CDR3-FR4

[0316] in which FR1 to FR4 refer to framework regions 1 to 4, respectively, and in which CDR1 to CDR3 refer to the complementarity determining regions 1 to 3, respectively, and in which
[0317] a) the amino acid residue at position 108 according to the Kabat numbering is Q;
   and/or in which:
[0318] b) the amino acid residue at position 44 according to the Kabat numbering is E and in which the amino acid residue at position 45 according to the Kabat numbering is an R;
   and/or in which:
[0319] c) the amino acid residue at position 103 according to the Kabat numbering is chosen from the group consisting of P, R and S, and is in particular chosen from the group consisting of R and S;
   and in which:
[0320] d) CDR1, CDR2 and CDR3 are as defined herein, and are preferably as defined according to one of the preferred embodiments herein, and are more preferably as defined according to one of the more preferred embodiments herein.

[0321] In particular, a Nanobody against the IL-6 receptor, according to the invention may have the structure:

[0322] FR1-CDR1-FR2-CDR2-FR3-CDR3-FR4

[0323] in which FR1 to FR4 refer to framework regions 1 to 4, respectively, and in which CDR1 to CDR3 refer to the complementarity determining regions 1 to 3, respectively, and in which
[0324] a) the amino acid residue at position 108 according to the Kabat numbering is Q;
   and/or in which:
[0325] b) the amino acid residue at position 44 according to the Kabat numbering is E and in which the amino acid residue at position 45 according to the Kabat numbering is an R;
   and/or in which:
[0326] c) the amino acid residue at position 103 according to the Kabat numbering is chosen from the group consisting of P, R and S, and is in particular chosen from the group consisting of R and S;
   and in which:
[0327] d) CDR1, CDR2 and CDR3 are as defined herein, and are preferably as defined according to one of the preferred embodiments herein, and are more preferably as defined according to one of the more preferred embodiments herein.

[0328] In particular, according to one preferred, but non-limiting aspect of the invention, a Nanobody can generally be defined as a polypeptide comprising an amino acid sequence that is comprised of four framework regions/sequences interrupted by three complementarity determining regions/sequences, in which;
[0329] a-1) the amino acid residue at position 44 according to the Kabat numbering is chosen from the group consisting of A, G, E, D, G, Q, R, S, L; and is preferably chosen from the group consisting of G, E or Q; and
[0330] a-2) the amino acid residue at position 45 according to the Kabat numbering is chosen from the group consisting of L, R or C; and is preferably chosen from the group consisting of L or R; and
[0331] a-3) the amino acid residue at position 103 according to the Kabat numbering is chosen from the group consisting of W, R or S; and is preferably W or R, and is most preferably W;
[0332] a-4) the amino acid residue at position 108 according to the Kabat numbering is Q;
   or in which:
[0333] b-1) the amino acid residue at position 44 according to the Kabat numbering is chosen from the group consisting of E and Q; and
[0334] b-2) the amino acid residue at position 45 according to the Kabat numbering is R; and
[0335] b-3) the amino acid residue at position 103 according to the Kabat numbering is chosen from the group consisting of W, R and S; and is preferably W;
[0336] b-4) the amino acid residue at position 108 according to the Kabat numbering is chosen from the group consisting of Q and L; and is preferably Q;
   or in which:
[0337] c-1) the amino acid residue at position 44 according to the Kabat numbering is chosen from the group consisting of A, G, E, D, Q, R, S and L; and is preferably chosen from the group consisting of G, E and Q; and
[0338] c-2) the amino acid residue at position 45 according to the Kabat numbering is chosen from the group consisting of L, R and C; and is preferably chosen from the group consisting of L and R; and
[0339] c-3) the amino acid residue at position 103 according to the Kabat numbering is chosen from the group consisting of P, R and S; and is in particular chosen from the group consisting of R and S; and
[0340] c-4) the amino acid residue at position 108 according to the Kabat numbering is chosen from the group consisting of Q and L; is preferably Q;

[0341] and in which
[0342] d) CDR1, CDR2 and CDR3 are as defined herein, and are preferably as defined according to one of the preferred embodiments herein, and are more preferably as defined according to one of the more preferred embodiments herein.

[0343] Thus, in another preferred, but non-limiting aspect, a Nanobody of the invention may have the structure

[0344] FR1-CDR1-FR2-CDR2-FR3-CDR3-FR4

[0345] in which FR1 to FR4 refer to framework regions 1 to 4, respectively, and in which CDR1 to CDR3 refer to the complementarity determining regions 1 to 3, respectively, and in which:
[0346] a-1) the amino acid residue at position 44 according to the Kabat numbering is chosen from the group consisting of A, G, E, D, G, Q, R, S, L; and is preferably chosen from the group consisting of G, E or Q;
   and in which:
[0347] a-2) the amino acid residue at position 45 according to the Kabat numbering is chosen from the group consisting of L, R or C; and is preferably chosen from the group consisting of L or R;
   and in which:
[0348] a-3) the amino acid residue at position 103 according to the Kabat numbering is chosen from the group consisting of W, R or S; and is preferably W or R, and is most preferably W;
   and in which
[0349] a-4) the amino acid residue at position 108 according to the Kabat numbering is Q;
   and in which:
[0350] d) CDR1, CDR2 and CDR3 are as defined herein, and are preferably as defined according to one of the preferred embodiments herein, and are more preferably as defined according to one of the more preferred embodiments herein.

[0351] In another preferred, but non-limiting aspect, a Nanobody of the invention may have the structure

[0352] FR1-CDR1-FR2-CDR2-FR3-CDR3-FR4

[0353] in which FR1 to FR4 refer to framework regions 1 to 4, respectively, and in which CDR1 to CDR3 refer to the complementarity determining regions 1 to 3, respectively, and in which:
[0354] b-1) the amino acid residue at position 44 according to the Kabat numbering is chosen from the group consisting of E and Q;
   and in which:
[0355] b-2) the amino acid residue at position 45 according to the Kabat numbering is R;
   and in which:
[0356] b-3) the amino acid residue at position 103 according to the Kabat numbering is chosen from the group consisting of W, R and S; and is preferably W;
   and in which:
[0357] b-4) the amino acid residue at position 108 according to the Kabat numbering is chosen from the group consisting of Q and L; and is preferably Q;
   and in which:
[0358] d) CDR1, CDR2 and CDR3 are as defined herein, and are preferably as defined according to one of the preferred embodiments herein, and are more preferably as defined according to one of the more preferred embodiments herein.

[0359] In another preferred, but non-limiting aspect, a Nanobody of the invention may have the structure

[0360] FR1-CDR1-FR2-CDR2-FR3-CDR3-FR4

[0361] in which FR1 to FR4 refer to framework regions 1 to 4, respectively, and in which CDR1 to CDR3 refer to the complementarity determining regions 1 to 3, respectively, and in which:
[0362] c-1) the amino acid residue at position 44 according to the Kabat numbering is chosen from the group consisting of A, G, E, D, Q, R, S and L; and is preferably chosen from the group consisting of G, E and Q;
   and in which:
[0363] c-2) the amino acid residue at position 45 according to the Kabat numbering is chosen from the group consisting of L, R and C; and is preferably chosen from the group consisting of L and R;
   and in which:
[0364] c-3) the amino acid residue at position 103 according to the Kabat numbering is chosen from the group consisting of P, R and S; and is in particular chosen from the group consisting of R and S;
   and in which:
[0365] c-4) the amino acid residue at position 108 according to the Kabat numbering is chosen from the group consisting of Q and L; is preferably Q;
   and in which:
[0366] d) CDR1, CDR2 and CDR3 are as defined herein, and are preferably as defined according to one of the preferred embodiments herein, and are more preferably as defined according to one of the more preferred embodiments herein.

[0367] Two particularly preferred, but non-limiting groups of the Nanobodies of the invention are those according to a) above; according to (a-1) to (a-5) above; according to b) above; according to (b-1) to (b-4) above; according to (c) above; and/or according to (c-1) to (c-4) above, in which;
[0368] a) the amino acid residues at positions 44-47 according to the Kabat numbering form the sequence GLEW (or a GLEW-like sequence as defined herein) and the amino acid residue at position 108 is Q; or in which:
[0369] b) the amino acid residues at positions 43-46 according to the Kabat numbering form the sequence KERE or KQRE (or a KERE-like sequence) and the amino acid residue at position 108 is Q or L, and is preferably Q.

[0370] Thus, in another preferred, but non-limiting aspect, a Nanobody of the invention may have the structure

[0371] FR1-CDR1-FR2-CDR2-FR3-CDR3-FR4

[0372] in which FR1 to FR4 refer to framework regions 1 to 4, respectively, and in which CDR1 to CDR3 refer to the complementarity determining regions 1 to 3, respectively, and in which:
[0373] a) the amino acid residues at positions 44-47 according to the Kabat numbering form the sequence GLEW (or a GLEW-like sequence as defined herein) and the amino acid residue at position 108 is Q;
   and in which:
[0374] b) CDR1, CDR2 and CDR3 are as defined herein, and are preferably as defined according to one of the preferred embodiments herein, and are more preferably as defined according to one of the more preferred embodiments herein.

[0375] In another preferred, but non-limiting aspect, a Nanobody of the invention may have the structure

[0376] FR 1-CDR 1-FR2-CDR2-FR3-CDR3-FR4

[0377] in which FR1 to FR4 refer to framework regions 1 to 4, respectively, and in which CDR1 to CDR3 refer to the complementarity determining regions 1 to 3, respectively, and in which:
[0378] a) the amino acid residues at positions 43-46 according to the Kabat numbering form the sequence KERE or KQRE (or a KERE-like sequence) and the amino acid residue at position 108 is Q or L, and is preferably Q;
   and in which:
[0379] b) CDR1, CDR2 and CDR3 are as defined herein, and are preferably as defined according to one of the preferred embodiments herein, and are more preferably as defined according to one of the more preferred embodiments herein.

[0380] In the Nanobodies of the invention in which the amino acid residues at positions 43-46 according to the Kabat numbering form the sequence KERE or KQRE, the amino acid residue at position 37 is most preferably F. In the Nanobodies of the invention in which the amino acid residues at positions 44-47 according to the Kabat numbering form the sequence GLEW, the amino acid residue at position 37 is chosen from the group consisting of Y, H, I, L, V or F, and is most preferably V.

[0381] Thus, without being limited hereto in any way, on the basis of the amino acid residues present on the positions mentioned above, the Nanobodies of the invention can generally be classified on the basis of the following three groups:
[0382] a) The “GLEW-group”: Nanobodies with the amino acid sequence GLEW at positions 44-47 according to the Kabat numbering and Q at position 108 according to the Kabat numbering. As further described herein, Nanobodies within this group usually have a V at position 37, and can have a W, P, R or S at position 103, and preferably have a W at position 103. The GLEW group also comprises some GLEW-like sequences such as those mentioned in Table A-3 below;
[0383] b) The “KERE-group”: Nanobodies with the amino acid sequence KERE or KQRE (or another KERE-like sequence) at positions 43-46 according to the Kabat numbering and Q or L at position 108 according to the Kabat numbering. As further described herein, Nanobodies within this group usually have a F at position 37, an L or F at position 47; and can have a W, P, R or S at position 103, and preferably have a W at position 103;
[0384] c) The “103 P, R, S-group”: Nanobodies with a P, R or S at position 103. These Nanobodies can have either the amino acid sequence GLEW at positions 44-47 according to the Kabat numbering or the amino acid sequence KERE or KQRE at positions 43-46 according to the Kabat numbering, the latter most preferably in combination with an F at position 37 and an L or an F at position 47 (as defined for the KERE-group); and can have Q or L at position 108 according to the Kabat numbering, and preferably have Q.

[0385] Also, where appropriate, Nanobodies may belong to (i.e. have characteristics of) two or more of these classes. For example, one specifically preferred group of Nanobodies has GLEW or a GLEW-like sequence at positions 44-47; P, R or S (and in particular R) at position 103; and Q at position 108 (which may be humanized to 108L).

[0386] Thus, in another preferred, but non-limiting aspect, a Nanobody of the invention may be a Nanobody belonging to the GLEW-group (as defined herein), and in which CDR1, CDR2 and CDR3 are as defined herein, and are preferably as defined according to one of the preferred embodiments herein, and are more preferably as defined according to one of the more preferred embodiments herein.

[0387] In another preferred, but non-limiting aspect, a Nanobody of the invention may be a Nanobody belonging to the KERE-group (as defined herein), and CDR1, CDR2 and CDR3 are as defined herein, and are preferably as defined according to one of the preferred embodiments herein, and are more preferably as defined according to one of the more preferred embodiments herein.

[0388] Thus, in another preferred, but non-limiting aspect, a Nanobody of the invention may be a Nanobody belonging to the 103 P, R, S-group (as defined herein), and in which CDR1, CDR2 and CDR3 are as defined herein, and are preferably as defined according to one of the preferred embodiments herein, and are more preferably as defined according to one of the more preferred embodiments herein.

[0389] Also, more generally and in addition to the 108Q, 43E/44R and 103P, R, S residues mentioned above, the Nanobodies of the invention can contain, at one or more positions that in a conventional V_{H} domain would form (part of) the V_{H}/V_{L} interface, one or more amino acid residues that are more highly charged than the amino acid residues that naturally occur at the same position(s) in the corresponding naturally occurring V_{H} sequence, and in particular one or more charged amino acid residues (as mentioned in Table A-2). Such substitutions include, but are not limited to, the GLEW-like sequences mentioned in Table A-3 below; as well as the substitutions that are described in the International Application WO 00/29004 for so-called “microbodies”, e.g. so as to obtain a Nanobody with Q at position 108 in combination with KLEW at positions 44-47. Other possible substitutions at these positions will be clear to the skilled person based upon the disclosure herein.

[0390] In one embodiment of the Nanobodies of the invention, the amino acid residue at position 83 is chosen from the group consisting of L, M, S, V and W; and is preferably L.

[0391] Also, in one embodiment of the Nanobodies of the invention, the amino acid residue at position 83 is chosen from the group consisting of R, K, N, E, G, I, T and Q; and is most preferably either K or E (for Nanobodies corresponding to naturally occurring V_{HH} domains) or R (for “humanized” Nanobodies, as described herein). The amino acid residue at position 84 is chosen from the group consisting of P, A, R, S, D T, and V in one embodiment, and is most preferably P (for Nanobodies corresponding to naturally occurring V_{HH} domains) or R (for “humanized” Nanobodies, as described herein).

[0392] Furthermore, in one embodiment of the Nanobodies of the invention, the amino acid residue at position 104 is chosen from the group consisting of G and D; and is most preferably G.

[0393] Collectively, the amino acid residues at positions 11, 37, 44, 45, 47, 83, 84, 103, 104 and 108, which in the Nanobodies are as mentioned above, will also be referred to herein as the “Hallmark Residues”. The Hallmark Residues and the amino acid residues at the corresponding positions of the most closely related human V_{H} domain, V_{H}3, are summarized in Table A-3.

[0394] Some especially preferred but non-limiting combinations of these Hallmark Residues as occur in naturally occurring V_{HH} domains are mentioned in Table A-4. For comparison, the corresponding amino acid residues of the human V_{H}3 called DP-47 have been indicated in italics.

TABLE A-3
Hallmark Residues in Nanobodies

| Position | Human V_{H}3 | Hallmark Residues |
|---|---|---|
| 11 | L, V; | L, M, S, V, W; preferably L |
| | predominantly L | |
| 37 | V, I, F; usually V | F⁽¹⁾, Y, H, I, L or V, preferably F⁽¹⁾ or Y |
| 44⁽⁸⁾ | G | G⁽²⁾, E⁽³⁾, A, D, Q, R, S, L; |
| | | preferably G⁽²⁾, E⁽³⁾ or Q; |
| | | most preferably G⁽²⁾ or E⁽³⁾. |
| 45⁽⁸⁾ | L | L⁽²⁾, R⁽³⁾, C, I, L, P, Q, V; preferably L⁽²⁾ |
| | | or R⁽³⁾ |
| 47⁽⁸⁾ | W, Y | W⁽²⁾, L⁽¹⁾ or F⁽¹⁾, A, G, I, M, R, S, V or |
| | | Y; preferably W⁽²⁾, L⁽¹⁾, F⁽¹⁾ or R |
| 83 | R or K; usually R | R, K⁽⁵⁾, N, E⁽⁵⁾, G, I, M, Q or T; |
| | | preferably K or R; most preferably K |
| 84 | A, T, D; | P⁽⁵⁾, A, L, R, S, T, D, V; preferably P |
| | predominantly A | |
| 103 | W | W⁽⁴⁾, P⁽⁶⁾, R⁽⁶⁾, S; preferably W |
| 104 | G | G or D; preferably G |
| 108 | L, M or T; | Q, L⁽⁷⁾ or R; preferably Q or L⁽⁷⁾ |
| | predominantly L | |

Notes:
a) In particular, but not exclusively, in combination with KERE or KQRE at positions 43-46.
b) Usually as GLEW at positions 44-47.
c) Usually as KERE or KQRE at positions 43-46, e.g. as KEREL, KEREF, KQREL, KQREF or KEREG at positions 43-47. Alternatively, also sequences such as TERE (for example TEREL), KECE (for example KECEL or KECER), RERE (for example REREG), QERE (for example QEREG), KGRE (for example KGREG), KDRE (for example KDREV) are possible. Some other possible, but less preferred sequences include for example DECKL and NVCEL.
d) With both GLEW at positions 44-47 and KERE or KQRE at positions 43-46.
e) Often as KP or EP at positions 83-84 of naturally occurring V_{HH} domains.
f) In particular, but not exclusively, in combination with GLEW at positions 44-47.
g) With the proviso that when positions 44-47 are GLEW, position 108 in (non-humanized) VHH sequences that also contain a W at 103.
h) The GLEW group also contains GLEW-like sequences at positions 44-47, such as for example GVEW, EPEW, GLER, DQEW, DLEW, GIEW, ELEW, GPEW, EWLP, GPER, GLER and ELEW.

TABLE A-4
Some preferred but non-limiting combinations of Hallmark
Residues in naturally occurring Nanobodies.

| | 11 | 37 | 44 | 45 | 47 | 83 | 84 | 103 | 104 | 108 |
|---|---|---|---|---|---|---|---|---|---|---|
| DP-47 | M | V | G | L | W | R | A | W | G | L |
| (human) | | | | | | | | | | |
| “KERE” | L | F | E | R | L | K | P | W | G | Q |
| group | L | F | E | R | F | E | P | W | G | Q |
| | L | F | E | R | F | K | P | W | G | Q |
| | L | Y | Q | R | L | K | P | W | G | Q |
| | L | F | L | R | V | K | P | Q | G | Q |
| | L | F | Q | R | L | K | P | W | G | Q |
| | L | F | E | R | F | K | P | W | G | Q |
| “GLEW” | L | V | G | L | W | K | S | W | G | Q |
| group | M | V | G | L | W | K | P | R | G | Q |

For humanization of these combinations, reference is made to the specification.

[0395] In the Nanobodies, each amino acid residue at any other position than the Hallmark Residues can be any amino acid residue that naturally occurs at the corresponding position (according to the Kabat numbering) of a naturally occurring V_{HH} domain.

[0396] Such amino acid residues will be clear to the skilled person. Tables A-5-A-8 mention some non-limiting residues that can be present at each position (according to the Kabat numbering) of the FR1, FR2, FR3 and FR4 of naturally occurring V_{HH} domains. For each position, the amino acid residue that most frequently occurs at each position of a naturally occurring V_{HH} domain (and which is the most preferred amino acid residue for said position in a Nanobody) is indicated in bold; and other preferred amino acid residues for each position have been underlined (note: the number of amino acid residues that are found at positions 26-30 of naturally occurring V_{HH} domains supports the hypothesis underlying the numbering by Chothia (supra) that the residues at these positions already form part of CDR1.)

[0397] In Tables A-5-A-8, some of the non-limiting residues that can be present at each position of a human V_{H}3 domain have also been mentioned. Again, for each position, the amino acid residue that most frequently occurs at each position of a naturally occurring human V_{H}3 domain is indicated in bold; and other preferred amino acid residues have been underlined.

[0398] For reference only, Tables A-5 to A-8 also contain data on the V_{HH} entropy (“V_{HH} Ent”) and V_{HH} variability (“V_{HH} Var.”) at each amino acid position for a representative sample of 1118 V_{HH} sequences (data kindly provided by David Lutje Hulsing and Prof. Theo Verrips of Utrecht University). The values for the V_{HH} entropy and the V_{HH} variability provide a measure for the variability and degree of conservation of amino acid residues between the 1118 V_{HH} sequences analyzed: low values (i.e. <1, such as <0.5) indicate that an amino acid residue is highly conserved between the V_{HH} sequences (i.e. little variability). For example, the G at position 8 and the G at position 9 have values for the V_{HH} entropy of 0.1 and 0 respectively, indicating that these residues are highly conserved and have little variability (and in case of position 9 is G in all 1118 sequences analysed), whereas for residues that form part of the CDR's generally values of 1.5 or more are found (data not shown). Note that (1) the amino acid residues listed in the second column of Tables A-5-A-8 are based on a bigger sample than the 1118 V_{HH} sequences that were analysed for determining the V_{HH} entropy and V_{HH} variability referred to in the last two columns; and (2) the data represented below support the hypothesis that the amino acid residues at positions 27-30 and maybe even also at positions 93 and 94 already form part of the CDR's (although the invention is not limited to any specific hypothesis or explanation, and as mentioned above, herein the numbering according to Kabat is used). For a general explanation of sequence entropy, sequence variability and the methodology for determining the same, see Oliveira et al., PROTEINS: Structure, Function and Genetics, 52: 544-552 (2003).

TABLE A-5
Non-limiting examples of amino acid residues in FR1 (for the
footnotes, see the footnotes to Table A-3)

| | Amino acid residue(s): | | | V_{HH} |
|---|---|---|---|---|
| Position | Human V_{H}3 | Camelid V_{HH}'s | V_{HH} Ent. | Var. |
| 1 | E, Q | Q, A, E | — | — |
| 2 | V | V | 0.2 | 1 |
| 3 | Q | Q, K | 0.3 | 2 |
| 4 | L | L | 0.1 | 1 |
| 5 | V, L | Q, E, L, V | 0.8 | 3 |
| 6 | E | E, D, Q, A | 0.8 | 4 |
| 7 | S, T | S, F | 0.3 | 2 |
| 8 | G, R | G | 0.1 | 1 |
| 9 | G | G | 0 | 1 |
| 10 | G, V | G, D, R | 0.3 | 2 |
| 11 | Hallmark residue: L, M, S, V, W; | | 0.8 | 2 |
| | preferably L | | | |
| 12 | V, I | V, A | 0.2 | 2 |
| 13 | Q, K, R | Q, E, K, P, R | 0.4 | 4 |
| 14 | P | A, Q, A, G, P, S, T, V | 1 | 5 |
| 15 | G | G | 0 | 1 |
| 16 | G, R | G, A, E, D | 0.4 | 3 |
| 17 | S | S, F | 0.5 | 2 |
| 18 | L | L, V | 0.1 | 1 |
| 19 | R, K | R, K, L, N, S, T | 0.6 | 4 |
| 20 | L | L, F, I, V | 0.5 | 4 |
| 21 | S | S, A, F, T | 0.2 | 3 |
| 22 | C | C | 0 | 1 |
| 23 | A, T | A, D, E, P, S, T, V | 1.3 | 5 |
| 24 | A | A, I, L, S, T, V | 1 | 6 |
| 25 | S | S, A, F, P, T | 0.5 | 5 |
| 26 | G | G, A, D, E, R, S, T, V | 0.7 | 7 |
| 27 | F | S, F, R, L, P, G, N, | 2.3 | 13 |
| 28 | T | N, T, E, D, S, I, R, A, | 1.7 | 11 |
| | | G, R, F, Y | | |
| 29 | F, V | F, L, D, S, I, G, V, A | 1.9 | 11 |
| 30 | S, D, G | N, S, E, G, A, D, M, T | 1.8 | 11 |

TABLE A-6
Non-limiting examples of amino acid residues in FR2 (for the
footnotes, see the footnotes to Table A-3)

| | Amino acid residue(s): | | V_{HH} | V_{HH} |
|---|---|---|---|---|
| Position | Human V_{H}3 | Camelid V_{HH}'s | Ent. | Var. |
| 36 | W | W | 0.1 | 1 |
| 37 | Hallmark residue: F⁽¹⁾, H, I, L, Y or | | 1.1 | 6 |
| | V, preferably F⁽¹⁾ or Y | | | |
| 38 | R | R | 0.2 | 1 |
| 39 | Q | Q, H, P, R | 0.3 | 2 |
| 40 | A | A, F, G, L, P, T, V | 0.9 | 7 |
| 41 | P, S, T | P, A, L, S | 0.4 | 3 |
| 42 | G | G, E | 0.2 | 2 |
| 43 | K | K, D, E, N, Q, R, T, V | 0.7 | 6 |
| 44 | Hallmark residue: G⁽²⁾, E⁽³⁾, | | 1.3 | 5 |
| | A, D, Q, R, S, L; preferably | | | |
| | G⁽²⁾, E⁽³⁾ or Q; | | | |
| | most preferably G⁽²⁾ or E⁽³⁾ | | | |
| 45 | Hallmark residue: L⁽²⁾, R⁽³⁾, | | 0.6 | 4 |
| | C, I, L, P, Q, V; preferably L⁽²⁾ | | | |
| | or R⁽³⁾ | | | |
| 46 | E, V | E, D, K, Q, V | 0.4 | 2 |
| 47 | Hallmark residue: W⁽²⁾, L⁽¹⁾ or F⁽¹⁾, | | 1.9 | 9 |
| | A, G, I, M, R, S, V or Y; preferably | | | |
| | W⁽²⁾, L⁽¹⁾, F⁽¹⁾ or R | | | |
| 48 | V | V, I, L | 0.4 | 3 |
| 49 | S, A, G | A, S, G, T, V | 0.8 | 3 |

TABLE A-7
Non-limiting examples of amino acid residues in FR3 (for the
footnotes, see the footnotes to Table A-3)

| | Amino acid residue(s): | | | V_{HH} |
|---|---|---|---|---|
| Position | Human V_{H}3 | Camelid V_{HH}'s | V_{HH} Ent. | Var. |
| 66 | R | R | 0.1 | 1 |
| 67 | F | F, L, V | 0.1 | 1 |
| 68 | T | T, A, N, S | 0.5 | 4 |
| 69 | I | I, L, M, V | 0.4 | 4 |
| 70 | S | S, A, F, T | 0.3 | 4 |
| 71 | R | R, G, H, I, L, K, Q, S, T, W | 1.2 | 8 |
| 72 | D, E | D, E, G, N, V | 0.5 | 4 |
| 73 | N, D, G | N, A, D, F, I, K, L, R, S, | 1.2 | 9 |
| | | T, V, Y | | |
| 74 | A, S | A, D, G, N, P, S, T, V | 1 | 7 |
| 75 | K | K, A, E, K, L, N, Q, R | 0.9 | 6 |
| 76 | N, S | N, D, K, R, S, T, Y | 0.9 | 6 |
| 77 | S, T, I | T, A, E, I, M, P, S | 0.8 | 5 |
| 78 | L, A | V, L, A, F, G, I, M | 1.2 | 5 |
| 79 | Y, H | Y, A, D, F, H, N, S, T | 1 | 7 |
| 80 | L | L, F, V | 0.1 | 1 |
| 81 | Q | Q, E, I, L, R, T | 0.6 | 5 |
| 82 | M | M, I, L, V | 0.2 | 2 |
| 82a | N, G | N, D, G, H, S, T | 0.8 | 4 |
| 82b | S | S, N, D, G, R, T | 1 | 6 |
| 82c | L | L, P, V | 0.1 | 2 |
| 83 | Hallmark residue: R, K⁽⁵⁾, N, E⁽⁵⁾, G, I, M, | | 0.9 | 7 |
| | Q or T; preferably K or R; most preferably K | | | |
| 84 | Hallmark residue: P⁽⁵⁾, A, D, L, R, S, T, V; | | 0.7 | 6 |
| | preferably P | | | |
| 85 | E, G | E, D, G, Q | 0.5 | 3 |
| 86 | D | D | 0 | 1 |
| 87 | T, M | T, A, S | 0.2 | 3 |
| 88 | A | A, G, S | 0.3 | 2 |
| 89 | V, L | V, A, D, I, L, M, N, R, T | 1.4 | 6 |
| 90 | Y | Y, F | 0 | 1 |
| 91 | Y, H | Y, D, F, H, L, S, T, V | 0.6 | 4 |
| 92 | C | C | 0 | 1 |
| 93 | A, K, T | A, N, G, H, K, N, R, S, | 1.4 | 10 |
| | | T, V, Y | | |
| 94 | K, R, T | A, V, C, F, G, I, K, L, R, | 1.6 | 9 |
| | | S or T | | |

TABLE A-8
Non-limiting examples of amino acid residues in FR4 (for the
footnotes, see the footnotes to Table A-3)

| | |
|---|---|
| Amino acid residue(s): | V_{HH} |

| | | | | |
|---|---|---|---|---|
| Position | Human V_{H}3 | Camelid V_{HH}'s | V_{HH} Ent. | Var. |

| | | | |
|---|---|---|---|
| 103 | Hallmark residue: W⁽⁴⁾, P⁽⁶⁾, | 0.4 | 2 |
| | R⁽⁶⁾, S; preferably W | | |
| 104 | Hallmark residue: G or D; | 0.1 | 1 |
| | preferably G | | |

| | | | | |
|---|---|---|---|---|
| 105 | Q, R | Q, E, K, P, R | 0.6 | 4 |
| 106 | G | G | 0.1 | 1 |
| 107 | T | T, A, I | 0.3 | 2 |

| | | | |
|---|---|---|---|
| 108 | Hallmark residue: Q, L⁽⁷⁾ or | 0.4 | 3 |
| | R; preferably Q or L⁽⁷⁾ | | |

| | | | | |
|---|---|---|---|---|
| 109 | V | V | 0.1 | 1 |
| 110 | T | T, I, A | 0.2 | 1 |
| 111 | V | V, A, I | 0.3 | 2 |
| 112 | S | S, F | 0.3 | 1 |
| 113 | S | S, A, L, P, T | 0.4 | 3 |

[0399] Thus, in another preferred, but not limiting aspect, a Nanobody of the invention can have the structure

[0400] FR1-CDR1-FR2-CDR2-FR3-CDR3-FR4

[0401] in which FR1 to FR4 refer to framework regions 1 to 4, respectively, and in which CDR1 to CDR3 refer to the complementarity determining regions 1 to 3, respectively, and in which:
[0402] a) the Hallmark residues are as defined herein;
   and in which:
[0403] b) CDR1, CDR2 and CDR3 are as defined herein, and are preferably as defined according to one of the preferred embodiments herein, and are more preferably as defined according to one of the more preferred embodiments herein.

[0404] In another preferred, but not limiting aspect, a Nanobody of the invention can have the structure

[0405] FR1-CDR1-FR2-CDR2-FR3-CDR3-FR4

[0406] in which FR1 to FR4 refer to framework regions 1 to 4, respectively, and in which CDR1 to CDR3 refer to the complementarity determining regions 1 to 3, respectively, and in which:

[0407] and in which
[0408] a) FR1 is chosen from the group consisting of the amino acid sequence:

| | |
|---|---|
| [1] QVQLQESGGGXVQAGGSLRLSCAASG [26] | [SEQ ID NO: 1] |

[0409] or from the group consisting of amino acid sequences that have at least 80%, preferably at least 90%, more preferably at least 95%, even more preferably at least 99% sequence identity (as defined herein) with the above amino acid sequence; in which
[0410] i) any amino acid substitution at any position other than a Hallmark position is preferably either a conservative amino acid substitution (as defined herein) and/or an amino acid substitution as defined in Table A-5; and/or
[0411] ii) said amino acid sequence preferably only contains amino acid substitutions, and no amino acid deletions or insertions, compared to the above amino acid sequence(s);
[0412] and/or from the group consisting of amino acid sequences that have 3, 2 or only 1 “amino acid difference(s)” (as defined herein) with one of the above amino acid sequences, in which:
[0413] i) any amino acid substitution at any position other than a Hallmark position is preferably either a conservative amino acid substitution (as defined herein) and/or an amino acid substitution as defined in Table A-5; and/or
[0414] ii) said amino acid sequence preferably only contains amino acid substitutions, and no amino acid deletions or insertions, compared to the above amino acid sequence(s);
   and in which:
[0415] b) FR2 is chosen from the group consisting of the amino acid sequence:

| | |
|---|---|
| [36] WXRQAPGKXXEXVA [49] | [SEQ ID NO: 2] |

[0416] or from the group consisting of amino acid sequences that have at least 80%, preferably at least 90%, more preferably at least 95%, even more preferably at least 99% sequence identity (as defined herein) with the above amino acid sequence; in which
[0417] i) any amino acid substitution at any position other than a Hallmark position is preferably either a conservative amino acid substitution (as defined herein) and/or an amino acid substitution as defined in Table A-6; and/or
[0418] ii) said amino acid sequence preferably only contains amino acid substitutions, and no amino acid deletions or insertions, compared to the above amino acid sequence(s);
[0419] and/or from the group consisting of amino acid sequences that have 3, 2 or only 1 “amino acid difference(s)” (as defined herein) with one of the above amino acid sequences, in which:
[0420] i) any amino acid substitution at any position other than a Hallmark position is preferably either a conservative amino acid substitution (as defined herein) and/or an amino acid substitution as defined in Table A-6; and/or
[0421] ii) said amino acid sequence preferably only contains amino acid substitutions, and no amino acid deletions or insertions, compared to the above amino acid sequence(s);
   and in which:
[0422] c) FR3 is chosen from the group consisting of the amino acid sequence:

[SEQ ID NO: 3]

[66] RFTISRDNAKNTVYLQMNSLXXEDTAVYYCAA [94]

[0423] or from the group consisting of amino acid sequences that have at least 80%, preferably at least 90%, more preferably at least 95%, even more preferably at least 99% sequence identity (as defined herein) with the above amino acid sequence; in which
[0424] i) any amino acid substitution at any position other than a Hallmark position is preferably either a conservative amino acid substitution (as defined herein) and/or an amino acid substitution as defined in Table A-7; and/or
[0425] ii) said amino acid sequence preferably only contains amino acid substitutions, and no amino acid deletions or insertions, compared to the above amino acid sequence(s);
[0426] and/or from the group consisting of amino acid sequences that have 3, 2 or only 1 “amino acid difference(s)” (as defined herein) with one of the above amino acid sequences, in which:
[0427] i) any amino acid substitution at any position other than a Hallmark position is preferably either a conservative amino acid substitution (as defined herein) and/or an amino acid substitution as defined in Table A-7; and/or
[0428] ii) said amino acid sequence preferably only contains amino acid substitutions, and no amino acid deletions or insertions, compared to the above amino acid sequence(s);
   and in which:
[0429] d) FR4 is chosen from the group consisting of the amino acid sequence:

| | |
|---|---|
| [103] XXQGTXVTVSS [113] | [SEQ ID NO: 4] |

[0430] or from the group consisting of amino acid sequences that have at least 80%, preferably at least 90%, more preferably at least 95%, even more preferably at least 99% sequence identity (as defined herein) with the above amino acid sequence; in which
[0431] i) any amino acid substitution at any position other than a Hallmark position is preferably either a conservative amino acid substitution (as defined herein) and/or an amino acid substitution as defined in Table A-8; and/or
[0432] ii) said amino acid sequence preferably only contains amino acid substitutions, and no amino acid deletions or insertions, compared to the above amino acid sequence(s);
[0433] and/or from the group consisting of amino acid sequences that have 3, 2 or only 1 “amino acid difference(s)” (as defined herein) with one of the above amino acid sequences, in which:
[0434] i) any amino acid substitution at any position other than a Hallmark position is preferably either a conservative amino acid substitution (as defined herein) and/or an amino acid substitution as defined in Table A-8; and/or
[0435] ii) said amino acid sequence preferably only contains amino acid substitutions, and no amino acid deletions or insertions, compared to the above amino acid sequence(s);

[0436] and in which:
[0437] e) CDR1, CDR2 and CDR3 are as defined herein, and are preferably as defined according to one of the preferred embodiments herein, and are more preferably as defined according to one of the more preferred embodiments herein;
   in which the Hallmark Residues are indicated by “X” and are as defined hereinabove and in which the numbers between brackets refer to the amino acid positions according to the Kabat numbering.

[0438] In another preferred, but not limiting aspect, a Nanobody of the invention can have the structure

[0439] FR1-CDR1-FR2-CDR2-FR3-CDR3-FR4

in which FR1 to FR4 refer to framework regions 1 to 4, respectively, and in which CDR1 to CDR3 refer to the complementarity determining regions 1 to 3, respectively, and in which:
[0440] a) FR1 is chosen from the group consisting of the amino acid sequence:

| | |
|---|---|
| [1] QVQLQESGGGLVQAGGSLRLSCAASG [26] | [SEQ ID NO: 5] |

[0441] or from the group consisting of amino acid sequences that have at least 80%, preferably at least 90%, more preferably at least 95%, even more preferably at least 99% sequence identity (as defined herein) with the above amino acid sequence; in which
[0442] i) any amino acid substitution at any position other than a Hallmark position is preferably either a conservative amino acid substitution (as defined herein) and/or an amino acid substitution as defined in Table A-5; and/or
[0443] ii) said amino acid sequence preferably only contains amino acid substitutions, and no amino acid deletions or insertions, compared to the above amino acid sequence(s); and
[0444] iii) the Hallmark residue at position is as indicated in the sequence above; and/or from the group consisting of amino acid sequences that have 3, 2 or only 1 “amino acid difference(s)” (as defined herein) with one of the above amino acid sequences, in which:
[0445] i) any amino acid substitution at any position other than a Hallmark position is preferably either a conservative amino acid substitution (as defined herein) and/or an amino acid substitution as defined in Table A-5; and/or
[0446] ii) said amino acid sequence preferably only contains amino acid substitutions, and no amino acid deletions or insertions, compared to the above amino acid sequence(s); and
[0447] iii) the Hallmark residue at position is as indicated in the sequence above;
   and in which:
[0448] b) FR2 is chosen from the group consisting of the amino acid sequences:

| | |
|---|---|
| [36] WFRQAPGKERELVA [49] | [SEQ ID NO: 6] |
| [36] WFRQAPGKEREFVA [49] | [SEQ ID NO: 7] |
| [36] WFRQAPGKEREGA [49] | [SEQ ID NO: 8] |
| [36] WFRQAPGKQRELVA [49] | [SEQ ID NO: 9] |
| [36] WFRQAPGKQREFVA [49] | [SEQ ID NO: 10] |
| [36] WYRQAPGKGLEWA [49] | [SEQ ID NO: 11] |

[0449] or from the group consisting of amino acid sequences that have at least 80%, preferably at least 90%, more preferably at least 95%, even more preferably at least 99% sequence identity (as defined herein) with one of the above amino acid sequences; in which
[0450] i) any amino acid substitution at any position other than a Hallmark position is preferably either a conservative amino acid substitution (as defined herein) and/or an amino acid substitution as defined in Table A-6; and/or
[0451] ii) said amino acid sequence preferably only contains amino acid substitutions, and no amino acid deletions or insertions, compared to the above amino acid sequence(s); and
[0452] iii) the Hallmark residues at positions 37, 44, 45 and 47 are as indicated in each of the sequences above;
[0453] and/or from the group consisting of amino acid sequences that have 3, 2 or only 1 “amino acid difference(s)” (as defined herein) with one of the above amino acid sequences, in which:
[0454] i) any amino acid substitution at any position other than a Hallmark position is preferably either a conservative amino acid substitution (as defined herein) and/or an amino acid substitution as defined in Table A-6; and/or
[0455] ii) said amino acid sequence preferably only contains amino acid substitutions, and no amino acid deletions or insertions, compared to the above amino acid sequence(s); and
[0456] iii) the Hallmark residues at positions 37, 44, 45 and 47 are as indicated in each of the sequences above;
   and in which:
[0457] c) FR3 is chosen from the group consisting of the amino acid sequence:

[SEQ ID NO: 12]

[66] RFTISRDNAKNTVYLQMNSLKPEDTAVYYCAA [94]

[0458] or from the group consisting of amino acid sequences that have at least 80%, preferably at least 90%, more preferably at least 95%, even more preferably at least 99% sequence identity (as defined herein) with the above amino acid sequence; in which
[0459] i) any amino acid substitution at any position other than a Hallmark position is preferably either a conservative amino acid substitution (as defined herein) and/or an amino acid substitution as defined in Table A-7; and/or
[0460] ii) said amino acid sequence preferably only contains amino acid substitutions, and no amino acid deletions or insertions, compared to the above amino acid sequence(s); and
[0461] iii) the Hallmark residues at positions 83 and 84 are as indicated in each of the sequences above;
[0462] and/or from the group consisting of amino acid sequences that have 3, 2 or only 1 “amino acid difference(s)” (as defined herein) with one of the above amino acid sequences, in which:
[0463] i) any amino acid substitution at any position other than a Hallmark position is preferably either a conservative amino acid substitution (as defined herein) and/or an amino acid substitution as defined in Table A-7; and/or
[0464] ii) said amino acid sequence preferably only contains amino acid substitutions, and no amino acid deletions or insertions, compared to the above amino acid sequence(s); and
[0465] iii) the Hallmark residues at positions 83 and 84 are as indicated in each of the sequences above;

[0466] and in which:
[0467] d) FR4 is chosen from the group consisting of the amino acid sequences:

| | |
|---|---|
| [103] WGQGTQVTVSS [113] | [SEQ ID NO: 13] |
| [103] WGQGTLVTVSS [113] | [SEQ ID NO: 14] |

[0468] or from the group consisting of amino acid sequences that have at least 80%, preferably at least 90%, more preferably at least 95%, even more preferably at least 99% sequence identity (as defined herein) with one of the above amino acid sequence; in which
[0469] i) any amino acid substitution at any position other than a Hallmark position is preferably either a conservative amino acid substitution (as defined herein) and/or an amino acid substitution as defined in Table A-8; and/or
[0470] ii) said amino acid sequence preferably only contains amino acid substitutions, and no amino acid deletions or insertions, compared to the above amino acid sequence(s); and
[0471] iii) the Hallmark residues at positions 103, 104 and 108 are as indicated in each of the sequences above;
[0472] and/or from the group consisting of amino acid sequences that have 3, 2 or only 1 “amino acid difference(s)” (as defined herein) with one of the above amino acid sequences, in which:
[0473] i) any amino acid substitution at any position other than a Hallmark position is preferably either a conservative amino acid substitution (as defined herein) and/or an amino acid substitution as defined in Table A-8; and/or
[0474] ii) said amino acid sequence preferably only contains amino acid substitutions, and no amino acid deletions or insertions, compared to the above amino acid sequence(s); and
[0475] iii) the Hallmark residues at positions 103, 104 and 108 are as indicated in each of the sequences above;

[0476] and in which:
[0477] e) CDR1, CDR2 and CDR3 are as defined herein, and are preferably as defined according to one of the preferred embodiments herein, and are more preferably as defined according to one of the more preferred embodiments herein.

[0478] In another preferred, but not limiting aspect, a Nanobody of the invention can have the structure

[0479] FR1-CDR1-FR2-CDR2-FR3-CDR3-FR4

in which FR1 to FR4 refer to framework regions 1 to 4, respectively, and in which CDR1 to CDR3 refer to the complementarity determining regions 1 to 3, respectively, and in which:
and in which
[0480] a) FR1 is chosen from the group consisting of the amino acid sequence:

| | |
|---|---|
| [1] QVQLQESGGGLVQAGGSLRLSCAASG [26] | [SEQ ID NO: 5] |

[0481] and/or from the group consisting of amino acid sequences that have 3, 2 or only 1 “amino acid difference(s)” (as defined herein) with one of the above amino acid sequences, in which:
[0482] i) any amino acid substitution at any position other than a Hallmark position is preferably either a conservative amino acid substitution (as defined herein) and/or an amino acid substitution as defined in Table A-5; and/or
[0483] ii) said amino acid sequence preferably only contains amino acid substitutions, and no amino acid deletions or insertions, compared to the above amino acid sequence(s); and
[0484] iii) the Hallmark residue at position is as indicated in the sequence above;

[0485] and in which:
[0486] b) FR2 is chosen from the group consisting of the amino acid sequences:

| | |
|---|---|
| [36] WFRQAPGKERELVA [49] | [SEQ ID NO: 6] |
| [36] WFRQAPGKEREFVA [49] | [SEQ ID NO: 7] |
| [36] WFRQAPGKEREGA [49] | [SEQ ID NO: 8] |
| [36] WFRQAPGKQRELVA [49] | [SEQ ID NO: 9] |
| [36] WFRQAPGKQREFVA [49] | [SEQ ID NO: 10] |

[0487] and/or from the group consisting of amino acid sequences that have 2 or only 1 “amino acid difference(s)” (as defined herein) with one of the above amino acid sequences, in which:
[0488] i) any amino acid substitution at any position other than a Hallmark position is preferably either a conservative amino acid substitution (as defined herein) and/or an amino acid substitution as defined in Table A-6; and/or
[0489] ii) said amino acid sequence preferably only contains amino acid substitutions, and no amino acid deletions or insertions, compared to the above amino acid sequence(s); and
[0490] iii) the Hallmark residues at positions 37, 44, 45 and 47 are as indicated in each of the sequences above;
   and in which:
[0491] c) FR3 is chosen from the group consisting of the amino acid sequence:

[SEQ ID NO: 12]

[66] RFTISRDNAKNTVYLQMNSLKPEDTAVYYCAA [94]

[0492] and/or from the group consisting of amino acid sequences that have 3, 2 or only 1 “amino acid difference(s)” (as defined herein) with one of the above amino acid sequences, in which:
[0493] i) any amino acid substitution at any position other than a Hallmark position is preferably either a conservative amino acid substitution (as defined herein) and/or an amino acid substitution as defined in Table A-7; and/or
[0494] ii) said amino acid sequence preferably only contains amino acid substitutions, and no amino acid deletions or insertions, compared to the above amino acid sequence(s); and
[0495] iii) the Hallmark residues at positions 83 and 84 are as indicated in each of the sequences above;
   and in which:
[0496] d) FR4 is chosen from the group consisting of the ammo acid sequences:

| | |
|---|---|
| [103] WGQGTQVTVSS [113] | [SEQ ID NO: 13] |
| [103] WGQGTLVTVSS [113] | [SEQ ID NO: 14] |

[0497] and/or from the group consisting of amino acid sequences that have 3, 2 or only 1 “amino acid difference(s)” (as defined herein) with one of the above amino acid sequences, in which:
[0498] i) any amino acid substitution at any position other than a Hallmark position is preferably either a conservative amino acid substitution (as defined herein) and/or an amino acid substitution as defined in Table A-8; and/or
[0499] ii) said amino acid sequence preferably only contains amino acid substitutions, and no amino acid deletions or insertions, compared to the above amino acid sequence(s); and
[0500] iii) the Hallmark residues at positions 103, 104 and 108 are as indicated in each of the sequences above;
   and in which:
[0501] e) CDR1, CDR2 and CDR3 are as defined herein, and are preferably as defined according to one of the preferred embodiments herein, and are more preferably as defined according to one of the more preferred embodiments herein.

[0502] In another preferred, but not limiting aspect, a Nanobody of the invention can have the structure

[0503] FR1-CDR1-FR2-CDR2-FR3-CDR3-FR4

[0504] in which FR1 to FR4 refer to framework regions 1 to 4, respectively, and in which CDR1 to CDR3 refer to the complementarity determining regions 1 to 3, respectively, and in which:
[0505] a) FR1 is chosen from the group consisting of the amino acid sequence:

| | |
|---|---|
| [1] QVQLQESGGGLVQAGGSLRLSCAASG [26] | [SEQ ID NO: 5] |

[0506] and/or from the group consisting of amino acid sequences that have 3, 2 or only 1 “amino acid difference(s)” (as defined herein) with one of the above amino acid sequences, in which:
   [0507] i) any amino acid substitution at any position other than a Hallmark position is preferably either a conservative amino acid substitution (as defined herein) and/or an amino acid substitution as defined in Table A-5; and/or
   [0508] ii) said amino acid sequence preferably only contains amino acid substitutions, and no amino acid deletions or insertions, compared to the above amino acid sequence(s); and
   [0509] iii) the Hallmark residue at position is as indicated in the sequence above;
      and in which:
[0510] b) FR2 is chosen from the group consisting of the amino acid sequence:

| | |
|---|---|
| [36] WYRQAPGKGLEWA [49] | [SEQ ID NO: 11] |

[0511] and/or from the group consisting of amino acid sequences that have 2 or only 1 “amino acid difference(s)” (as defined herein) with one of the above amino acid sequences, in which:
[0512] i) any amino acid substitution at any position other than a Hallmark position is preferably either a conservative amino acid substitution (as defined herein) and/or an amino acid substitution as defined in Table A-6; and/or
[0513] ii) said amino acid sequence preferably only contains amino acid substitutions, and no amino acid deletions or insertions, compared to the above amino acid sequence(s); and
[0514] iii) the Hallmark residues at positions 37, 44, 45 and 47 are as indicated in each of the sequences above;
   and in which:
[0515] c) FR3 is chosen from the group consisting of the amino acid sequence:

[SEQ ID NO: 12]

[66] RFTISRDNAKNTVYLQMNSLKPEDTAVYYCAA [94]

[0516] and/or from the group consisting of amino acid sequences that have 3, 2 or only 1 “amino acid difference(s)” (as defined herein) with one of the above amino acid sequences, in which:
[0517] i) any amino acid substitution at any position other than a Hallmark position is preferably either a conservative amino acid substitution (as defined herein) and/or an amino acid substitution as defined in Table A-7; and/or
[0518] ii) said amino acid sequence preferably only contains amino acid substitutions, and no amino acid deletions or insertions, compared to the above amino acid sequence(s); and
[0519] iii) the Hallmark residues at positions 83 and 84 are as indicated in each of the sequences above;
   and in which:
[0520] d) FR4 is chosen from the group consisting of the amino acid sequence:

| | |
|---|---|
| [103] WGQGTQVTVSS [113] | [SEQ ID NO: 13] |

[0521] and/or from the group consisting of amino acid sequences that have 3, 2 or only 1 “amino acid difference(s)” (as defined herein) with one of the above amino acid sequences, in which:
[0522] i) any amino acid substitution at any position other than a Hallmark position is preferably either a conservative amino acid substitution (as defined herein) and/or an amino acid substitution as defined in Table A-8; and/or
[0523] ii) said amino acid sequence preferably only contains amino acid substitutions, and no amino acid deletions or insertions, compared to the above amino acid sequence(s); and
[0524] iii) the Hallmark residues at positions 103, 104 and 108 are as indicated in each of the sequences above;
   and in which:
[0525] e) CDR1, CDR2 and CDR3 are as defined herein, and are preferably as defined according to one of the preferred embodiments herein, and are more preferably as defined according to one of the more preferred embodiments herein.

[0526] Some other framework sequences that can be present in the Nanobodies of the invention can be found in the European patent EP 656 946 mentioned above (see for example also the granted U.S. Pat. No. 5,759,808),

[0527] In another preferred, but not limiting aspect, a Nanobody of the invention can have the structure

[0528] FR1-CDR1-FR2-CDR2-FR3-CDR3-FR4

[0529] in which FR1 to FR4 refer to framework regions 1 to 4, respectively, and in which CDR1 to CDR3 refer to the complementarity determining regions 1 to 3, respectively, and in which:

[0530] and in which
[0531] a) FR1 is chosen from the group consisting of the amino acid sequences of SEQ ID NO's: 42-92, or from the group consisting of amino acid sequences that have at least 80%, preferably at least 90%, more preferably at least 95%, even more preferably at least 99% sequence identity (as defined herein) with at least one of said FR1 sequences; in which
   [0532] i) any amino acid substitution at any position other than a Hallmark position is preferably either a conservative amino acid substitution (as defined herein) and/or an amino acid substitution as defined in Table A-5; and/or
   [0533] ii) said amino acid sequence preferably only contains amino acid substitutions, and no amino acid deletions or insertions, compared to said FR1 sequence; and
   [0534] iii) the Hallmark residue at position is as indicated in said FR1 sequence;
   [0535] and/or from the group consisting of amino acid sequences that have 3, 2 or only 1 “amino acid difference(s)” (as defined herein) with at least one of said FR1 sequences, in which:
   [0536] i) any amino acid substitution at any position other than a Hallmark position is preferably either a conservative amino acid substitution (as defined herein) and/or an amino acid substitution as defined in Table A-5; and/or
   [0537] ii) said amino acid sequence preferably only contains amino acid substitutions, and no amino acid deletions or insertions, compared to said FR1 sequence; and
   [0538] iii) the Hallmark residue at position is as indicated in said FR1 sequence;

[0539] and in which:
[0540] b) FR2 is chosen from the group consisting of the amino acid sequences of SEQ ID NO's: 144-194,
   [0541] or from the group consisting of amino acid sequences that have at least 80%, preferably at least 90%, more preferably at least 95%, even more preferably at least 99% sequence identity (as defined herein) with at least one of said FR2 sequences; in which
   [0542] i) any amino acid substitution at any position other than a Hallmark position is preferably either a conservative amino acid substitution (as defined herein) and/or an amino acid substitution as defined in Table A-6; and/or
   [0543] ii) said amino acid sequence preferably only contains amino acid substitutions, and no amino acid deletions or insertions, compared to said FR2 sequence; and
   [0544] iii) the Hallmark residues at positions 37, 44, 45 and 47 are as indicated in said FR2 sequence;
   [0545] and/or from the group consisting of amino acid sequences that have 3, 2 or only 1 “amino acid difference(s)” (as defined herein) with at least one of said FR2 sequences, in which:
   [0546] i) any amino acid substitution at any position other than a Hallmark position is preferably either a conservative amino acid substitution (as defined herein) and/or an amino acid substitution as defined in Table A-6; and/or
   [0547] ii) said amino acid sequence preferably only contains amino acid substitutions, and no amino acid deletions or insertions, compared to said FR2 sequence; and
   [0548] iii) the Hallmark residues at positions 37, 44, 45 and 47 are as indicated in said FR2 sequence;
      and in which:
[0549] c) FR3 is chosen from the group consisting of the amino acid sequences of SEQ ID NO's: 246-296, or from the group consisting of amino acid sequences that have at least 80%, preferably at least 90%, more preferably at least 95%, even more preferably at least 99% sequence identity (as defined herein) with at least one of said FR3 sequences; in which
   [0550] i) any amino acid substitution at any position other than a Hallmark position is preferably either a conservative amino acid substitution (as defined herein) and/or an amino acid substitution as defined in Table A-7; and/or
   [0551] ii) said amino acid sequence preferably only contains amino acid substitutions, and no amino acid deletions or insertions, compared to said FR3 sequence; and
   [0552] iii) the Hallmark residues at positions 83 and 84 are as indicated in said FR3 sequence;
   [0553] and/or from the group consisting of amino acid sequences that have 3, 2 or only 1 “amino acid difference(s)” (as defined herein) with at least one of said FR3 sequences, in which:
   [0554] i) any amino acid substitution at any position other than a Hallmark position is preferably either a conservative amino acid substitution (as defined herein) and/or an amino acid substitution as defined in Table A-7; and/or
   [0555] ii) said amino acid sequence preferably only contains amino acid substitutions, and no amino acid deletions or insertions, compared to said FR3 sequence; and
   [0556] iii) the Hallmark residues at positions 83 and 84 are as indicated in said FR3 sequence;
      and in which:
[0557] d) FR4 is chosen from the group consisting of the amino acid sequences of SEQ ID NO's: 348-398,
   [0558] or from the group consisting of amino acid sequences that have at least 80%, preferably at least 90%, more preferably at least 95%, even more preferably at least 99% sequence identity (as defined herein) with at least one of said FR4 sequences; in which
   [0559] i) any amino acid substitution at any position other than a Hallmark position is preferably either a conservative amino acid substitution (as defined herein) and/or an amino acid substitution as defined in Table A-8; and/or
   [0560] ii) said amino acid sequence preferably only contains amino acid substitutions, and no amino acid deletions or insertions, compared to said FR4 sequence; and
   [0561] iii) the Hallmark residues at positions 103, 104 and 108 are as indicated in said FR3 sequence;
   [0562] and/or from the group consisting of amino acid sequences that have 3, 2 or only 1 “amino acid difference(s)” (as defined herein) with at least one of said FR4 sequences, in which:
   [0563] i) any amino acid substitution at any position other than a Hallmark position is preferably either a conservative amino acid substitution (as defined herein) and/or an amino acid substitution as defined in Table A-8; and/or
   [0564] ii) said amino acid sequence preferably only contains amino acid substitutions, and no amino acid deletions or insertions, compared to said FR4 sequence; and
   [0565] iii) the Hallmark residues at positions 103, 104 and 108 are as indicated in said FR4 sequence;
      and in which:
[0566] e) CDR1, CDR2 and CDR3 are as defined herein, and are preferably as defined according to one of the preferred embodiments herein, and are more preferably as defined according to one of the more preferred embodiments herein.

[0567] Some particularly preferred Nanobodies of the invention can be chosen from the group consisting of the amino acid sequences of SEQ ID NO's: 399-449, or from the group consisting of amino acid sequences that have at least 80%, preferably at least 90%, more preferably at least 95%, even more preferably at least 99% sequence identity (as defined herein) with at least one of said amino acid sequences; in which
[0568] a) the Hallmark residues can be as indicated in Table A-3 above;
[0569] b) any amino acid substitution at any position other than a Hallmark position is preferably either a conservative amino acid substitution (as defined herein) and/or an amino acid substitution as defined in Tables A-5-A-8; and/or
[0570] c) said amino acid sequence preferably only contains amino acid substitutions, and no amino acid deletions or insertions, compared to the above amino acid sequence(s).

[0571] Some even more particularly preferred Nanobodies of the invention can be chosen from the group consisting of the amino acid sequences of SEQ ID NO's: 399-449, or from the group consisting of amino acid sequences that have at least 80%, preferably at least 90%, more preferably at least 95%, even more preferably at least 99% sequence identity (as defined herein) with at least one of said amino acid sequences; in which
[0572] a) the Hallmark residues are as indicated in the pertinent sequence from SEQ ID NO's: 399-449;
[0573] b) any amino acid substitution at any position other than a Hallmark position is preferably either a conservative amino acid substitution (as defined herein) and/or an amino acid substitution as defined in Tables A-5-A-8; and/or
[0574] c) said amino acid sequence preferably only contains amino acid substitutions, and no amino acid deletions or insertions, compared to the pertinent sequence chosen from SEQ ID NO's: 399-449.

[0575] Some of the most preferred Nanobodies of the invention against the IL-6 receptor can be chosen from the group consisting of the amino acid sequences of SEQ ID NO's: 399-449.

[0576] Preferably, the CDR sequences and FR sequences in the Nanobodies of the invention are such that the Nanobody of the invention binds to the IL-6 receptor, with an affinity (suitably measured and/or expressed as a K_{D}-value (actual or apparent), a K_{A}-value (actual or apparent), a kₒₙ-rate and/or a k_{off}-rate, or alternatively as an IC₅₀ value, as further described herein) that is as defined herein; as well as compounds and constructs, and in particular proteins and polypeptides, that comprise at least one such amino acid sequence.

[0577] In particular, amino acid sequences and polypeptides of the invention are preferably such that they:
[0578] bind to IL-6R with a dissociation constant (K_{D}) of 10⁻⁵ to 10⁻¹² moles/liter or less, and preferably 10⁻⁷ to 10⁻¹² moles/liter or less and more preferably 10⁻⁸ to 10⁻¹² moles/liter (i.e. with an association constant (K_{A}) of 10⁵ to 10¹² liter/moles or more, and preferably 10⁷ to 10¹² liter/moles or more and more preferably 10⁸ to 10¹² liter/moles);
   and/or such that they:
[0579] bind to IL-6R with a kₒₙ-rate of between 10² M⁻¹s⁻¹ to about 10⁷ M⁻¹s⁻¹, preferably between 10³ M⁻¹s⁻¹ and 10⁷ M⁻¹s⁻¹, more preferably between 10⁴ M⁻¹s⁻¹ and 10⁷ M⁻¹s⁻¹, such as between 10⁵ M⁻¹s⁻¹ and 10⁷ M⁻¹s⁻¹;
   and/or such that they:
[0580] bind to IL-6R with a k_{off} rate between 1 s⁻¹ (t_{1/2}=0.69 s) and 10⁶ s⁻¹ (providing a near irreversible complex with a t_{1/2} of multiple days), preferably between 10⁻² s⁻¹ and 10⁻⁶ s⁻¹, more preferably between 10⁻³ s⁻¹ and 10⁻⁶ s⁻¹, such as between 10⁻⁴ s⁻¹ and 10⁻⁶ s⁻¹.

[0581] Preferably, a monovalent amino acid sequence of the invention (or a polypeptide that contains only one amino acid sequence of the invention) is preferably such that it will bind to IL-6R with an affinity less than 500 nM, preferably less than 200 nM, more preferably less than 10 nM, such as less than 500 pM.

[0582] Some preferred IC₅₀ values for binding of the amino acid sequences or polypeptides of the invention to IL-6R will become clear from the further description and examples herein.

[0583] According to one non-limiting aspect of the invention, a Nanobody may be as defined herein, but with the proviso that it has at least “one amino acid difference” (as defined herein) in at least one of the framework regions compared to the corresponding framework region of a naturally occurring human V_{H} domain, and in particular compared to the corresponding framework region of DP-47. More specifically, according to one non-limiting aspect of the invention, a Nanobody may be as defined herein, but with the proviso that it has at least “one amino acid difference” (as defined herein) at least one of the Hallmark residues (including those at positions 108, 103 and/or 45) compared to the corresponding framework region of a naturally occurring human V_{H} domain, and in particular compared to the corresponding framework region of DP-47. Usually, a Nanobody will have at least one such amino acid difference with a naturally occurring V_{H} domain in at least one of FR2 and/or FR4, and in particular at least one of the Hallmark residues in FR2 and/or FR4 (again, (including those at positions 108, 103 and/or 45).

[0584] Also, a humanized Nanobody of the invention may be as defined herein, but with the proviso that it has at least “one amino acid difference” (as defined herein) in at least one of the framework regions compared to the corresponding framework region of a naturally occurring V_{HH} domain. More specifically, according to one non-limiting aspect of the invention, a humanized Nanobody may be as defined herein, but with the proviso that it has at least “one amino acid difference” (as defined herein) at least one of the Hallmark residues (including those at positions 108, 103 and/or 45) compared to the corresponding framework region of a naturally occurring V_{HH} domain. Usually, a humanized Nanobody will have at least one such amino acid difference with a naturally occurring V_{HH} domain in at least one of FR2 and/or FR4, and in particular at least one of the Hallmark residues in FR2 and/or FR4 (again, including those at positions 108, 103 and/or 45).

[0585] As will be clear from the disclosure herein, it is also within the scope of the invention to use natural or synthetic analogs, mutants, variants, alleles, homologs and orthologs (herein collectively referred to as “analogs”) of the Nanobodies of the invention as defined herein, and in particular analogs of the Nanobodies of SEQ ID NO's: 399-449. Thus, according to one embodiment of the invention, the term “Nanobody of the invention” in its broadest sense also covers such analogs.

[0586] Generally, in such analogs, one or more amino acid residues may have been replaced, deleted and/or added, compared to the Nanobodies of the invention as defined herein. Such substitutions, insertions or deletions may be made in one or more of the framework regions and/or in one or more of the CDR's. When such substitutions, insertions or deletions are made in one or more of the framework regions, they may be made at one or more of the Hallmark residues and/or at one or more of the other positions in the framework residues, although substitutions, insertions or deletions at the Hallmark residues are generally less preferred (unless these are suitable humanizing substitutions as described herein).

[0587] By means of non-limiting examples, a substitution may for example be a conservative substitution (as described herein) and/or an amino acid residue may be replaced by another amino acid residue that naturally occurs at the same position in another V_{HH} domain (see Tables A-5-A-8 for some non-limiting examples of such substitutions), although the invention is generally not limited thereto. Thus, any one or more substitutions, deletions or insertions, or any combination thereof, that either improve the properties of the Nanobody of the invention or that at least do not detract too much from the desired properties or from the balance or combination of desired properties of the Nanobody of the invention (i.e. to the extent that the Nanobody is no longer suited for its intended use) are included within the scope of the invention. A skilled person will generally be able to determine and select suitable substitutions, deletions or insertions, or suitable combinations of thereof, based on the disclosure herein and optionally after a limited degree of routine experimentation, which may for example involve introducing a limited number of possible substitutions and determining their influence on the properties of the Nanobodies thus obtained.

[0588] For example, and depending on the host organism used to express the Nanobody or polypeptide of the invention, such deletions and/or substitutions may be designed in such a way that one or more sites for post-translational modification (such as one or more glycosylation sites) are removed, as will be within the ability of the person skilled in the art. Alternatively, substitutions or insertions may be designed so as to introduce one or more sites for attachment of functional groups (as described herein), for example to allow site-specific pegylation (again as described herein).

[0589] As can be seen from the data on the V_{HH} entropy and V_{HH} variability given in Tables A-5-A-8 above, some amino acid residues in the framework regions are more conserved than others. Generally, although the invention in its broadest sense is not limited thereto, any substitutions, deletions or insertions are preferably made at positions that are less conserved. Also, generally, amino acid substitutions are preferred over amino acid deletions or insertions.

[0590] The analogs are preferably such that they can bind to the IL-6 receptor, with affinity (suitably measured and/or expressed as a K_{D}-value (actual or apparent), a K_{A}-value (actual or apparent), a kₒₙ-rate and/or a k_{off}-rate, or alternatively as an IC₅₀ value, as further described herein) that is as defined herein; as well as compounds and constructs, and in particular proteins and polypeptides, that comprise at least one such amino acid sequence.

[0591] In particular, amino acid sequences and polypeptides of the invention are preferably such that they:
[0592] bind to IL-6R with a dissociation constant (K_{D}) of 10⁻⁵ to 10⁻¹² moles/liter or less, and preferably 10⁻⁷ to 10⁻¹² moles/liter or less and more preferably 10⁻⁸ to 10⁻¹² moles/liter (i.e. with an association constant (K_{A}) of 10⁵ to 10¹² liter/moles or more, and preferably 10⁷ to 10¹² liter/moles or more and more preferably 10⁸ to 10¹² liter/moles);
   and/or such that they:
[0593] bind to IL-6R with a kₒₙ-rate of between 10² M⁻¹s⁻¹ to about 10⁷ M⁻¹s⁻¹, preferably between 10³ M⁻¹s⁻¹ and 10⁷ M⁻¹s⁻¹, more preferably between 10⁴ M⁻¹s⁻¹ and 10⁷ M⁻¹s⁻¹, such as between 10⁵ M⁻¹s⁻¹ and 10⁷ M⁻¹s⁻¹;
   and/or such that they:
[0594] bind to IL-6R with a k_{off} rate between 1 s⁻¹ (t_{1/2}=0.69 s) and 10⁻⁶ s⁻¹ (providing a near irreversible complex with a t_{1/2} of multiple days), preferably between 10⁻² s⁻¹ and 10⁻⁶ s⁻¹, more preferably between 10⁻³ s⁻¹ and 10⁻⁶ s⁻¹, such as between 10⁻⁴ s⁻¹ and 10⁻⁶ s⁻¹.

[0595] Preferably, a monovalent amino acid sequence of the invention (or a polypeptide that contains only one amino acid sequence of the invention) is preferably such that it will bind to IL-6R with an affinity less than 500 nM, preferably less than 200 nM, more preferably less than 10 nM, such as less than 500 pM.

[0596] Some preferred IC50 values for binding of the amino acid sequences or polypeptides of the invention to IL-6R will become clear from the further description and examples herein.

[0597] The analogs are preferably also such that they retain the favourable properties the Nanobodies, as described herein.

[0598] Also, according to one preferred embodiment, the analogs have a degree of sequence identity of at least 70%, preferably at least 80%, more preferably at least 90%, such as at least 95% or 99% or more; and/or preferably have at most 20, preferably at most 10, even more preferably at most 5, such as 4, 3, 2 or only 1 amino acid difference (as defined herein), with one of the Nanobodies of SEQ ID NOs 399-449.

[0599] Also, the framework sequences and CDR's of the analogs are preferably such that they are in accordance with the preferred embodiments defined herein. More generally, as described herein, the analogs will have (a) a Q at position 108; and/or (b) a charged amino acid or a cysteine residue at position 45 and preferably an E at position 44, and more preferably E at position 44 and R at position 45; and/or (c) P, R or S at position 103.

[0600] One preferred class of analogs of the Nanobodies of the invention comprise Nanobodies that have been humanized (i.e. compared to the sequence of a naturally occurring Nanobody of the invention). As mentioned in the background art cited herein, such humanization generally involves replacing one or more amino acid residues in the sequence of a naturally occurring V_{HH} with the amino acid residues that occur at the same position in a human V_{H} domain, such as a human V_{H}3 domain. Examples of possible humanizing substitutions or combinations of humanizing substitutions will be clear to the skilled person, for example from the Tables herein, from the possible humanizing substitutions mentioned in the background art cited herein, and/or from a comparison between the sequence of a Nanobody and the sequence of a naturally occurring human V_{H} domain.

[0601] The humanizing substitutions should be chosen such that the resulting humanized Nanobodies still retain the favourable properties of Nanobodies as defined herein, and more preferably such that they are as described for analogs in the preceding paragraphs. A skilled person will generally be able to determine and select suitable humanizing substitutions or suitable combinations of humanizing substitutions, based on the disclosure herein and optionally after a limited degree of routine experimentation, which may for example involve introducing a limited number of possible humanizing substitutions and determining their influence on the properties of the Nanobodies thus obtained.

[0602] Generally, as a result of humanization, the Nanobodies of the invention may become more “human-like”, while still retaining the favorable properties of the Nanobodies of the invention as described herein. As a result, such humanized Nanobodies may have several advantages, such as a reduced immunogenicity, compared to the corresponding naturally occurring V_{HH} domains. Again, based on the disclosure herein and optionally after a limited degree of routine experimentation, the skilled person will be able to select humanizing substitutions or suitable combinations of humanizing substitutions which optimize or achieve a desired or suitable balance between the favourable properties provided by the humanizing substitutions on the one hand and the favourable properties of naturally occurring V_{HH} domains on the other hand.

[0603] The Nanobodies of the invention may be suitably humanized at any framework residue(s), such as at one or more Hallmark residues (as defined herein) or at one or more other framework residues (i.e. non-Hallmark residues) or any suitable combination thereof. One preferred humanizing substitution for Nanobodies of the “P, R, S-103 group” or the “KERE group” is Q108 into L108. Nanobodies of the “GLEW class” may also be humanized by a Q108 into L108 substitution, provided at least one of the other Hallmark residues contains a camelid (camelizing) substitution (as defined herein). For example, as mentioned above, one particularly preferred class of humanized Nanobodies has GLEW or a GLEW-like sequence at positions 44-47; P, R or S (and in particular R) at position 103, and an L at position 108.

[0604] The humanized and other analogs, and nucleic acid sequences encoding the same, can be provided in any manner known per se. For example, the analogs can be obtained by providing a nucleic acid that encodes a naturally occurring V_{HH} domain, changing the codons for the one or more amino acid residues that are to be substituted into the codons for the corresponding desired amino acid residues (e.g. by site-directed mutagenesis or by PCR using suitable mismatch primers), expressing the nucleic acid/nucleotide sequence thus obtained in a suitable host or expression system; and optionally isolating and/or purifying the analog thus obtained to provide said analog in essentially isolated form (e.g. as further described herein). This can generally be performed using methods and techniques known per se, which will be clear to the skilled person, for example from the handbooks and references cited herein, the background art cited herein and/or from the further description herein. Alternatively, a nucleic acid encoding the desired analog can be synthesized in a manner known per se (for example using an automated apparatus for synthesizing nucleic acid sequences with a predefined amino acid sequence) and can then be expressed as described herein. Yet another technique may involve combining one or more naturally occurring and/or synthetic nucleic acid sequences each encoding a part of the desired analog, and then expressing the combined nucleic acid sequence as described herein. Also, the analogs can be provided using chemical synthesis of the pertinent amino acid sequence using techniques for peptide synthesis known per se, such as those mentioned herein.

[0605] In this respect, it will be also be clear to the skilled person that the Nanobodies of the invention (including their analogs) can be designed and/or prepared starting from human V_{H} sequences (i.e. amino acid sequences or the corresponding nucleotide sequences), such as for example from human V_{H}3 sequences such as DP-47, DP-51 or DP-29, i.e. by introducing one or more camelizing substitutions (i.e. changing one or more amino acid residues in the amino acid sequence of said human V_{H} domain into the amino acid residues that occur at the corresponding position in a V_{HH} domain), so as to provide the sequence of a Nanobody of the invention and/or so as to confer the favourable properties of a Nanobody to the sequence thus obtained. Again, this can generally be performed using the various methods and techniques referred to in the previous paragraph, using an amino acid sequence and/or nucleotide sequence for a human V_{H} domain as a starting point.

[0606] Some preferred, but non-limiting camelizing substitutions can be derived from Tables A-5-A-8. It will also be clear that camelizing substitutions at one or more of the Hallmark residues will generally have a greater influence on the desired properties than substitutions at one or more of the other amino acid positions, although both and any suitable combination thereof are included within the scope of the invention. For example, it is possible to introduce one or more camelizing substitutions that already confer at least some the desired properties, and then to introduce further camelizing substitutions that either further improve said properties and/or confer additional favourable properties. Again, the skilled person will generally be able to determine and select suitable camelizing substitutions or suitable combinations of camelizing substitutions, based on the disclosure herein and optionally after a limited degree of routine experimentation, which may for example involve introducing a limited number of possible camelizing substitutions and determining whether the favourable properties of Nanobodies are obtained or improved (i.e. compared to the original V_{H} domain).

[0607] Generally, however, such camelizing substitutions are preferably such that the resulting an amino acid sequence at least contains (a) a Q at position 108; and/or (b) a charged amino acid or a cysteine residue at position 45 and preferably also an E at position 44, and more preferably E at position 44 and R at position 45; and/or (c) P, R or S at position 103; and optionally one or more further camelizing substitutions. More preferably, the camelizing substitutions are such that they result in a Nanobody of the invention and/or in an analog thereof (as defined herein), such as in a humanized analog and/or preferably in an analog that is as defined in the preceding paragraphs.

[0608] As will also be clear from the disclosure herein, it is also within the scope of the invention to use parts or fragments, or combinations of two or more parts or fragments, of the Nanobodies of the invention as defined herein, and in particular parts or fragments of the Nanobodies of SEQ ID NO's 399-449. Thus, according to one embodiment of the invention, the term “Nanobody of the invention” in its broadest sense also covers such parts or fragments.

[0609] Generally, such parts or fragments of the Nanobodies of the invention (including analogs thereof) have amino acid sequences in which, compared to the amino acid sequence of the corresponding full length Nanobody of the invention (or analog thereof), one or more of the amino acid residues at the N-terminal end, one or more amino acid residues at the C-terminal end, one or more contiguous internal amino acid residues, or any combination thereof, have been deleted and/or removed.

[0610] The parts or fragments are preferably such that they can bind to the IL-6 receptor, with an affinity (suitably measured and/or expressed as a K_{D}-value (actual or apparent), a K_{A}-value (actual or apparent), a kₒₙ-rate and/or a k_{off}-rate, or alternatively as an IC₅₀ value, as further described herein) that is as defined herein; as well as compounds and constructs, and in particular proteins and polypeptides, that comprise at least one such amino acid sequence.

[0611] In particular, amino acid sequences and polypeptides of the invention are preferably such that they:
[0612] bind to IL-6R with a dissociation constant (K_{D}) of 10⁻⁵ to 10⁻¹² moles/liter or less, and preferably 10⁻⁷ to 10⁻¹² moles/liter or less and more preferably 10⁻⁸ to 10¹² moles/liter (i.e. with an association constant (K_{A}) of 10⁵ to 10¹² liter/moles or more, and preferably 10⁷ to 10¹² liter/moles or more and more preferably 10⁸ to 10¹² liter/moles);
   and/or such that they:
[0613] bind to IL-6R with a kₒₙ-rate of between 10² M⁻¹s⁻¹ to about 10⁷M⁻¹s⁻¹, preferably between 10³ M¹s⁻¹ and 10⁷ M⁻¹s⁻¹, more preferably between 10⁴ M⁻¹s⁻¹ and 10⁷ M⁻¹s⁻¹, such as between 10⁵ M¹s⁻¹ and 10⁷ M⁻¹s⁻¹;
   and/or such that they:
[0614] bind to IL-6R with a k_{off} rate between 1 s⁻¹ (t_{1/2}=0.69 s) and 10⁻⁶ s⁻¹ (providing a near irreversible complex with a t_{1/2} of multiple days), preferably between 10⁻² s⁻¹ and 10⁻⁶ s⁻¹, more preferably between 10⁻³ s⁻¹ and 10⁻⁴ s⁻¹, such as between 10⁴ s−1 and 10⁻⁶ s⁻¹.

[0615] Preferably, a monovalent amino acid sequence of the invention (or a polypeptide that contains only one amino acid sequence of the invention) is preferably such that it will bind to IL-6R with an affinity less than 500 nM, preferably less than 200 nM, more preferably less than 10 nM, such as less than 500 pM.

[0616] Some preferred IC50 values for binding of the amino acid sequences or polypeptides of the invention to IL-6R will become clear from the further description and examples herein.

[0617] The affinity of the analog against the IL-6 receptor, can be determined in a manner known per se, for example using the assay described herein.

[0618] Any part or fragment is preferably such that it comprises at least 10 contiguous amino acid residues, preferably at least 20 contiguous amino acid residues, more preferably at least 30 contiguous amino acid residues, such as at least 40 contiguous amino acid residues, of the amino acid sequence of the corresponding full length Nanobody of the invention.

[0619] Also, any part or fragment is such preferably that it comprises at least one of CDR1, CDR2 and/or CDR3 or at least part thereof (and in particular at least CDR3 or at least part thereof). More preferably, any part or fragment is such that it comprises at least one of the CDR's (and preferably at least CDR3 or part thereof) and at least one other CDR (i.e. CDR1 or CDR2) or at least part thereof, preferably connected by suitable framework sequence(s) or at least part thereof. More preferably, any part or fragment is such that it comprises at least one of the CDR's (and preferably at least CDR3 or part thereof) and at least part of the two remaining CDR's, again preferably connected by suitable framework sequence(s) or at least part thereof.

[0620] According to another particularly preferred, but non-limiting embodiment, such a part or fragment comprises at least CDR3, such as FR3, CDR3 and FR4 of the corresponding full length Nanobody of the invention, i.e. as for example described in the International application WO 03/050531 (Lasters et al.).

[0621] As already mentioned above, it is also possible to combine two or more of such parts or fragments (i.e. from the same or different Nanobodies of the invention), i.e. to provide an analog (as defined herein) and/or to provide further parts or fragments (as defined herein) of a Nanobody of the invention. It is for example also possible to combine one or more parts or fragments of a Nanobody of the invention with one or more parts or fragments of a human V_{H} domain.

[0622] According to one preferred embodiment, the parts or fragments have a degree of sequence identity of at least 50%, preferably at least 60%, more preferably at least 70%, even more preferably at least 80%, such as at least 90%, 95% or 99% or more with one of the Nanobodies of SEQ ID NOs: 399-449.

[0623] The parts and fragments, and nucleic acid sequences encoding the same, can be provided and optionally combined in any manner known per se. For example, such parts or fragments can be obtained by inserting a stop codon in a nucleic acid that encodes a full-sized Nanobody of the invention, and then expressing the nucleic acid thus obtained in a manner known per se (e.g. as described herein). Alternatively, nucleic acids encoding such parts or fragments can be obtained by suitably restricting a nucleic acid that encodes a full-sized Nanobody of the invention or by synthesizing such a nucleic acid in a manner known per se. Parts or fragments may also be provided using techniques for peptide synthesis known per se.

[0624] The invention in its broadest sense also comprises derivatives of the Nanobodies of the invention. Such derivatives can generally be obtained by modification, and in particular by chemical and/or biological (e.g. enzymatical) modification, of the Nanobodies of the invention and/or of one or more of the amino acid residues that form the Nanobodies of the invention.

[0625] Examples of such modifications, as well as examples of amino acid residues within the Nanobody sequence that can be modified in such a manner (i.e. either on the protein backbone but preferably on a side chain), methods and techniques that can be used to introduce such modifications and the potential uses and advantages of such modifications will be clear to the skilled person.

[0626] For example, such a modification may involve the introduction (e.g. by covalent linking or in an other suitable manner) of one or more functional groups, residues or moieties into or onto the Nanobody of the invention, and in particular of one or more functional groups, residues or moieties that confer one or more desired properties or functionalities to the Nanobody of the invention. Example of such functional groups will be clear to the skilled person.

[0627] For example, such modification may comprise the introduction (e.g. by covalent binding or in any other suitable manner) of one or more functional groups that that increase the half-life, the solubility and/or the absorption of the Nanobody of the invention, that reduce the immunogenicity and/or the toxicity of the Nanobody of the invention, that eliminate or attenuate any undesirable side effects of the Nanobody of the invention, and/or that confer other advantageous properties to and/or reduce the undesired properties of the Nanobodies and/or polypeptides of the invention; or any combination of two or more of the foregoing. Examples of such functional groups and of techniques for introducing them will be clear to the skilled person, and can generally comprise all functional groups and techniques mentioned in the general background art cited hereinabove as well as the functional groups and techniques known per se for the modification of pharmaceutical proteins, and in particular for the modification of antibodies or antibody fragments (including ScFv's and single domain antibodies), for which reference is for example made to Remington's Pharmaceutical Sciences, 16th ed., Mack Publishing Co., Easton, Pa. (1980). Such functional groups may for example be linked directly (for example covalently) to a Nanobody of the invention, or optionally via a suitable linker or spacer, as will again be clear to the skilled person.

[0628] One of the most widely used techniques for increasing the half-life and/or reducing the immunogenicity of pharmaceutical proteins comprises attachment of a suitable pharmacologically acceptable polymer, such as poly(ethyleneglycol) (PEG) or derivatives thereof (such as methoxypoly(ethyleneglycol) or mPEG). Generally, any suitable form of pegylation can be used, such as the pegylation used in the art for antibodies and antibody fragments (including but not limited to (single) domain antibodies and ScFv's); reference is made to for example Chapman, Nat. Biotechnol., 54, 531-545 (2002); by Veronese and Harris, Adv. Drug Deliv. Rev. 54, 453-456 (2003), by Harris and Chess, Nat. Rev. Drug. Discov., 2, (2003) and in WO 04/060965. Various reagents for pegylation of proteins are also commercially available, for example from Nektar Therapeutics, USA.

[0629] Preferably, site-directed pegylation is used, in particular via a cysteine-residue (see for example Yang et al., Protein Engineering, 16, 10, 761-770 (2003). For example, for this purpose, PEG may be attached to a cysteine residue that naturally occurs in a Nanobody of the invention, a Nanobody of the invention may be modified so as to suitably introduce one or more cysteine residues for attachment of PEG, or an amino acid sequence comprising one or more cysteine residues for attachment of PEG may be fused to the N- and/or C-terminus of a Nanobody of the invention, all using techniques of protein engineering known per se to the skilled person.

[0630] Preferably, for the Nanobodies and proteins of the invention, a PEG is used with a molecular weight of more than 5000, such as more than 10,000 and less than 200,000, such as less than 100,000; for example in the range of 20,000-80,000.

[0631] Another, usually less preferred modification comprises N-linked or O-linked glycosylation, usually as part of co-translational and/or post-translational modification, depending on the host cell used for expressing the Nanobody or polypeptide of the invention.

[0632] Yet another modification may comprise the introduction of one or more detectable labels or other signal-generating groups or moieties, depending on the intended use of the labelled Nanobody. Suitable labels and techniques for attaching, using and detecting them will be clear to the skilled person, and for example include, but are not limited to, fluorescent labels (such as fluorescein, isothiocyanate, rhodamine, phycoerythrin, phycocyanin, allophycocyanin, o-phthaldehyde, and fluorescamine and fluorescent metals such as ¹⁵²Eu or others metals from the lanthanide series), phosphorescent labels, chemiluminescent labels or bioluminescent labels (such as luminal, isoluminol, theromatic acridinium ester, imidazole, acridinium salts, oxalate ester, dioxetane or GFP and its analogs), radio-isotopes (such as ³H, ¹²⁵I, ³²P, ³⁵S, ¹⁴C, ⁵¹Cr, ³⁶Cl, ⁵⁷Co, ⁵⁸Co, ⁵⁹Fe, and ⁷⁵Se), metals, metals chelates or metallic cations (for example metallic cations such as ^{99m}Tc, ¹²³I, ¹¹¹In, ¹³¹I, ⁹⁷Ru, ⁶⁷Cu, ⁶⁷Ga, and ⁶⁸Ga or other metals or metallic cations that are particularly suited for use in in vivo, in vitro or in situ diagnosis and imaging, such as (¹⁵⁷Gd, ⁵⁵Mn, ¹⁶²Dy, ⁵²Cr, and ⁵⁶Fe), as well as chromophores and enzymes (such as malate dehydrogenase, staphylococcal nuclease, delta-V-steroid isomerase, yeast alcohol dehydrogenase, alpha-glycerophosphate dehydrogenase, triose phosphate isomerase, biotinavidin peroxidase, horseradish peroxidase, alkaline phosphatase, asparaginase, glucose oxidase, β-galactosidase, ribonuclease, urease, catalase, glucose-VI-phosphate dehydrogenase, glucoamylase and acetylcholine esterase). Other suitable labels will be clear to the skilled person, and for example include moieties that can be detected using NMR or ESR spectroscopy.

[0633] Such labelled Nanobodies and polypeptides of the invention may for example be used for in vitro, in vivo or in situ assays (including immunoassays known per se such as ELISA, RIA, EIA and other “sandwich assays”, etc.) as well as in vivo diagnostic and imaging purposes, depending on the choice of the specific label.

[0634] As will be clear to the skilled person, another modification may involve the introduction of a chelating group, for example to chelate one of the metals or metallic cations referred to above. Suitable chelating groups for example include, without limitation, diethyl-enetriaminepentaacetic acid (DTPA) or ethylenediaminetetraacetic acid (EDTA).

[0635] Yet another modification may comprise the introduction of a functional group that is one part of a specific binding pair, such as the biotin-(strept)avidin binding pair. Such a functional group may be used to link the Nanobody of the invention to another protein, polypeptide or chemical compound that is bound to the other half of the binding pair, i.e. through formation of the binding pair. For example, a Nanobody of the invention may be conjugated to biotin, and linked to another protein, polypeptide, compound or carrier conjugated to avidin or streptavidin. For example, such a conjugated Nanobody may be used as a reporter, for example in a diagnostic system where a detectable signal-producing agent is conjugated to avidin or streptavidin. Such binding pairs may for example also be used to bind the Nanobody of the invention to a carrier, including carriers suitable for pharmaceutical purposes. One non-limiting example are the liposomal formulations described by Cao and Suresh, Journal of Drug Targeting, 8, 4, 257 (2000). Such binding pairs may also be used to link a therapeutically active agent to the Nanobody of the invention.

[0636] For some applications, in particular for those applications in which it is intended to kill a cell that expresses the target against which the Nanobodies of the invention are directed (e.g. in the treatment of cancer), or to reduce or slow the growth and/or proliferation such a cell, the Nanobodies of the invention may also be linked to a toxin or to a toxic residue or moiety. Examples of toxic moieties, compounds or residues which can be linked to a Nanobody of the invention to provide—for example—a cytotoxic compound will be clear to the skilled person and can for example be found in the prior art cited above and/or in the further description herein. One example is the so-called ADEPT™ technology WO 03/055527.

[0637] Other potential chemical and enzymatical modifications will be clear to the skilled person. Such modifications may also be introduced for research purposes (e.g. to study function-activity relationships). Reference is for example made to Lundblad and Bradshaw, Biotechnol. Appl. Biochem., 26, 143-151 (1997).

[0638] Preferably, the derivatives are such that they bind to the IL-6 receptor, with an affinity (suitably measured and/or expressed as a K_{D}-value (actual or apparent), a K_{A}-value (actual or apparent), a kₒₙ-rate and/or a k_{off}-rate, or alternatively as an IC₅₀ value, as further described herein) that is as defined herein; as well as compounds and constructs, and in particular proteins and polypeptides, that comprise at least one such amino acid sequence.

[0639] In particular, amino acid sequences and polypeptides of the invention are preferably such that they:
[0640] bind to IL-6R with a dissociation constant (K_{D}) of 10⁻⁵ to 10⁻¹² moles/liter or less, and preferably 10⁻⁷ to 10⁻¹² moles/liter or less and more preferably 10⁴ to 10⁻¹² moles/liter (i.e. with an association constant (K_{A}) of 10⁵ to 10¹² liter/moles or more, and preferably 10⁷ to 10¹² liter/moles or more and more preferably 10⁸ to 10¹² liter/moles);
   and/or such that they:
[0641] bind to IL-6R with a kₒₙ-rate of between 10² M⁻¹s⁻¹ to about 10⁷ M⁻¹s⁻¹, preferably between 10³ M⁻¹s⁻¹ and 10⁷ M⁻¹s⁻¹, more preferably between 10⁴ M⁻¹s⁻¹ and 10⁷ M⁻¹s⁻¹, such as between 10⁵ M⁻¹s⁻¹ and 10⁷ M⁻¹s⁻¹;
   and/or such that they:
[0642] bind to IL-6R with a k_{off} rate between 1 s⁻¹ (t_{1/2}=0.69 s) and 10⁻⁶ s⁻¹ (providing a near irreversible complex with a t_{1/2} of multiple days), preferably between 10⁻² s⁻¹ and 10⁻⁶ s⁻¹, more preferably between 10⁻³ s⁻¹ and 10⁻⁶ s⁻¹, such as between 10⁻⁴ s⁻¹ and 10⁻⁶ s⁻¹.

[0643] Preferably, a monovalent amino acid sequence of the invention (or a polypeptide that contains only one amino acid sequence of the invention) is preferably such that it will bind to IL-6R with an affinity less than 500 nM, preferably less than 200 nM, more preferably less than 10 nM, such as less than 500 pM.

[0644] Some preferred IC50 values for binding of the amino acid sequences or polypeptides of the invention to IL-6R will become clear from the further description and examples herein.

[0645] The affinity of a derivative of a Nanobody of the invention against the IL-6 receptor, can be determined in a manner known per se, for example using the assay described herein.

[0646] As mentioned above, the invention also relates to proteins or polypeptides that essentially consist of or comprise at least one Nanobody of the invention. By “essentially consist of” is meant that the amino acid sequence of the polypeptide of the invention either is exactly the same as the amino acid sequence of a Nanobody of the invention or corresponds to the amino acid sequence of a Nanobody of the invention which has a limited number of amino acid residues, such as 1-20 amino acid residues, for example 1-10 amino acid residues and preferably 1-6 amino acid residues, such as 1, 2, 3, 4, 5 or 6 amino acid residues, added at the amino terminal end, at the carboxy terminal end, or at both the amino terminal end and the carboxy terminal end of the amino acid sequence of the Nanobody.

[0647] Said amino acid residues may or may not change, alter or otherwise influence the (biological) properties of the Nanobody and may or may not add further functionality to the Nanobody. For example, such amino acid residues:
[0648] a) can comprise an N-terminal Met residue, for example as result of expression in a heterologous host cell or host organism.
[0649] b) may form a signal sequence or leader sequence that directs secretion of the Nanobody from a host cell upon synthesis. Suitable secretory leader peptides will be clear to the skilled person, and may be as further described herein. Usually, such a leader sequence will be linked to the N-terminus of the Nanobody, although the invention in its broadest sense is not limited thereto;
[0650] c) may form a sequence or signal that allows the Nanobody to be directed towards and/or to penetrate or enter into specific organs, tissues, cells, or parts or compartments of cells, and/or that allows the Nanobody to penetrate or cross a biological barrier such as a cell membrane, a cell layer such as a layer of epithelial cells, a tumor including solid tumors, or the blood-brain-barrier. Examples of such amino acid sequences will be clear to the skilled person. Some non-limiting examples are the small peptide vectors (“Pep-trans vectors”) described in WO 03/026700 and in Temsamani et al., Expert Opin. Biol. Ther., 1, 773 (2001); Temsamani and Vidal, Drug Discov. Today, 9, 1012 (004) and Rousselle, J. Pharmacol. Exp. Ther., 296, 124-131 (2001), and the membrane translocator sequence described by Zhao et al., Apoptosis, 8, 631-637 (2003). C-terminal and N-terminal amino acid sequences for intracellular targeting of antibody fragments are for example described by Cardinale et al., Methods, 34, 171 (2004). Other suitable techniques for intracellular targeting involve the expression and/or use of so-called “intrabodies” comprising a Nanobody of the invention, as mentioned below;
[0651] d) may form a “tag”, for example an amino acid sequence or residue that allows or facilitates the purification of the Nanobody, for example using affinity techniques directed against said sequence or residue. Thereafter, said sequence or residue may be removed (e.g. by chemical or enzymatical cleavage) to provide the Nanobody sequence (for this purpose, the tag may optionally be linked to the Nanobody sequence via a cleavable linker sequence or contain a cleavable motif). Some preferred, but non-limiting examples of such residues are multiple histidine residues, glutatione residues and a myc-tag such as AAAEQKLISEEDLNGAA [SEQ ID NO:31];
[0652] e) may be one or more amino acid residues that have been functionalized and/or that can serve as a site for attachment of functional groups. Suitable amino acid residues and functional groups will be clear to the skilled person and include, but are not limited to, the amino acid residues and functional groups mentioned herein for the derivatives of the Nanobodies of the invention.

[0653] According to another embodiment, a polypeptide of the invention comprises a Nanobody of the invention, which is fused at its amino terminal end, at its carboxy terminal end, or both at its amino terminal end and at its carboxy terminal end to at least one further amino acid sequence, i.e. so as to provide a fusion protein comprising said Nanobody of the invention and the one or more further amino acid sequences. Such a fusion will also be referred to herein as a “Nanobody fusion”.

[0654] The one or more further amino acid sequence may be any suitable and/or desired amino acid sequences. The further amino acid sequences may or may not change, alter or otherwise influence the (biological) properties of the Nanobody, and may or may not add further functionality to the Nanobody or the polypeptide of the invention. Preferably, the further amino acid sequence is such that it confers one or more desired properties or functionalities to the Nanobody or the polypeptide of the invention.

[0655] Example of such amino acid sequences will be clear to the skilled person, and may generally comprise all amino acid sequences that are used in peptide fusions based on conventional antibodies and fragments thereof (including but not limited to ScFv's and single domain antibodies). Reference is for example made to the review by Holliger and Hudson, Nature Biotechnology, 23, 9, 1126-1136 (2005),

[0656] For example, such an amino acid sequence may be an amino acid sequence that increases the half-life, the solubility, or the absorption, reduces the immunogenicity or the toxicity, eliminates or attenuates undesirable side effects, and/or confers other advantageous properties to and/or reduces the undesired properties of the polypeptides of the invention, compared to the Nanobody of the invention per se. Some non-limiting examples of such amino acid sequences are serum proteins, such as human serum albumin (see for example WO 00/27435) or haptenic molecules (for example haptens that are recognized by circulating antibodies, see for example WO 98/22141).

[0657] The further amino acid sequence may also provide a second binding site, which binding site may be directed against any desired protein, polypeptide, antigen, antigenic determinant or epitope (including but not limited to the same protein, polypeptide, antigen, antigenic determinant or epitope against which the Nanobody of the invention is directed, or a different protein, polypeptide, antigen, antigenic determinant or epitope). For example, the further amino acid sequence may provide a second binding site that is directed against a serum protein (such as, for example, human serum albumin or another serum protein such as IgG), so as to provide increased half-life in serum. Reference is for example made to EP 0 368 684, WO 91/01743, WO 01/45746 and WO 04/003019 (in which various serum proteins are mentioned), the International application by Ablynx N.V. entitled “Nanobodies against amyloid-beta and polypeptides comprising the same for the treatment of degenerative neural diseases such as Alzheimer's disease” (in which various other proteins are mentioned), as well as to Harmsen et al., Vaccine, 23 (41); 4926-42, 2005.

[0658] According to another embodiment, the one or more further amino acid sequences may comprise one or more parts, fragments or domains of conventional 4-chain antibodies (and in particular human antibodies) and/or of heavy chain antibodies. For example, although usually less preferred, a Nanobody of the invention may be linked to a conventional (preferably human) V_{H} or V_{L} domain domain or to a natural or synthetic analog of a V_{H} or V_{L} domain, again optionally via a linker sequence (including but not limited to other (single) domain antibodies, such as the dAb's described by Ward et al.).

[0659] In one specific aspect of the invention, a Nanobody of the invention or a compound, construct or polypeptide of the invention comprising at least one Nanobody of the invention may have an increased half-life, compared to the corresponding amino acid sequence of the invention. Some preferred, but non-limiting examples of such Nanobodies, compounds and polypeptides will become clear to the skilled person based on the further disclosure herein, and for example comprise Nanobodies sequences or polypeptides of the invention that have been chemically modified to increase the half-life thereof (for example, by means of pegylation); amino acid sequences of the invention that comprise at least one additional binding site for binding to a serum protein (such as serum albumin. Reference is for example made to the US provisional application by Ablynx N.V. entitled “Immunoglobulin domains with multiple binding sites” filed on Nov. 27, 2006); or polypeptides of the invention that comprise at least one Nanobody of the invention that is linked to at least one moiety (and in particular at least one amino acid sequence) that increases the half-life of the Nanobody of the invention. Examples of polypeptides of the invention that comprise such half-life extending moieties or amino acid sequences will become clear to the skilled person based on the further disclosure herein; and for example include, without limitation, polypeptides in which the one or more Nanobodies of the invention are suitable linked to one or more serum proteins or fragments thereof (such as serum albumin or suitable fragments thereof) or to one or more binding units that can bind to serum proteins (such as, for example, Nanobodies or (single) domain antibodies that can bind to serum proteins such as serum albumin, serum immunoglobulins such as IgG, or transferrine); polypeptides in which a Nanobody of the invention is linked to an Fc portion (such as a human Fc) or a suitable part or fragment thereof; or polypeptides in which the one or more Nanobodies of the invention are suitable linked to one or more small proteins or peptides that can bind to serum proteins (such as, without limitation, the proteins and peptides described in WO 91/01743, WO 01/45746, WO 02/076489).

[0660] Generally, the Nanobodies of the invention (or compounds, constructs or polypeptides comprising the same) with increased half-life preferably have a half-life that is at least 1.5 times, preferably at least 2 times, such as at least 5 times, for example at least 10 times or more than 20 times, greater than the half-life of the corresponding amino acid sequence of the invention per se. For example, the Nanobodies, compounds, constructs or polypeptides of the invention with increased half-life may have a half-life that is increased with more than 1 hours, preferably more than 2 hours, more preferably more than 6 hours, such as more than 12 hours, or even more than 24, 48 or 72 hours, compared to the corresponding amino acid sequence of the invention per se.

[0661] In a preferred, but non-limiting aspect of the invention, such Nanobodies, compound, constructs or polypeptides of the invention exhibit a serum half-life in human of at least about 12 hours, preferably at least 24 hours, more preferably at least 48 hours, even more preferably at least 72 hours or more. For example, compounds or polypeptides of the invention may have a half-life of at least 5 days (such as about 5 to 10 days), at preferably at least 9 days (such as about 9 to 14 days), more preferably at least about 10 days (such as about 10 to 15 days), or at least about 11 days (such as about 11 to 16 days), more preferably at least about 12 days (such as about 12 to 18 days or more), or more than 14 days (such as about 14 to 19 days).

[0662] In another one aspect of the invention, a polypeptide of the invention comprises one or more (such as two or preferably one) Nanobodies of the invention linked (optionally via one or more suitable linker sequences) to one or more (such as two and preferably one) amino acid sequences that allow the resulting polypeptide of the invention to cross the blood brain barrier. In particular, said one or more amino acid sequences that allow the resulting polypeptides of the invention to cross the blood brain barrier may be one or more (such as two and preferably one) Nanobodies, such as the Nanobodies described in WO 02/057445, of which FC44 (SEQ ID NO: 189 of WO 06/040153) and FC5 (SEQ ID NO: 190 of WO 06/040154) are preferred examples.

[0663] In particular, it has been described in the art that linking fragments of immunoglobulins (such as V_{H} domains) to serum albumin or to fragments thereof can be used to increase the half-life. Reference is for made to WO 00/27435 and WO 01/077137). According to the invention, the Nanobody of the invention is preferably either directly linked to serum albumin (or to a suitable fragment thereof) or via a suitable linker, and in particular via a suitable peptide linked so that the polypeptide of the invention can be expressed as a genetic fusion (protein). According to one specific aspect, the Nanobody of the invention may be linked to a fragment of serum albumin that at least comprises the domain III of serum albumin or part thereof. Reference is for example made to the U.S. provisional application 60/788,256 of Ablynx N.V. entitled “Albumin derived amino acid sequence, use thereof for increasing the half-life of therapeutic proteins and of other therapeutic proteins and entities, and constructs comprising the same” filed on Mar. 31, 2006.

[0664] Some preferred, but non-limiting, examples of fusions of anti-IL6R Nanobodies to human serum albumin are given in SEQ ID NO's: 603-608.

[0665] Alternatively, the further amino acid sequence may provide a second binding site or binding unit that is directed against a serum protein (such as, for example, human serum albumin or another serum protein such as IgG), so as to provide increased half-life in serum. Such amino acid sequences for example include the Nanobodies described below, as well as the small peptides and binding proteins described in WO 91/01743, WO 01/45746 and WO 02/076489 and the dAb's described in WO 03/002609 and WO 04/003019. Reference is also made to Harmsen et al., Vaccine, 23 (41); 4926-42, as well as to EP 0 368 684, as well as to the following the U.S. provisional applications 60/843,349, 60/850,774, 60/850,775 by Ablynx N.V. mentioned herein.

[0666] Such amino acid sequences may in particular be directed against serum albumin (and more in particular human serum albumin) and/or against IgG (and more in particular human IgG). For example, such amino acid sequences may be amino acid sequences that are directed against (human) serum albumin and that amino acid sequences that can bind to amino acid residues on (human) serum albumin that are not involved in binding of serum albumin to FcRn (see for example WO 06/0122787) and/or amino acid sequences that are capable of binding to amino acid residues on serum albumin that do not form part of domain III of serum albumin (see again see for example WO 06/0122787); amino acid sequences that have or can provide an increased half-life (see for example the U.S. provisional application 60/843,349 by Ablynx N.V. entitled “Serum albumin binding proteins with long half-lives” filed on Sep. 8, 2006); amino acid sequences against human serum albumin that are cross-reactive with serum albumin from at least one species of mammal, and in particular with at least one species of primate (such as, without limitation, monkeys from the genus Macaca (such as, and in particular, cynomolgus monkeys (Macaca fascicularis) and/or rhesus monkeys (Macaca mulatta)) and baboon (Papio ursinus), reference is again made to the U.S. provisional application 60/843,349); amino acid sequences that can bind to serum albumin in a pH independent manner (see for example the U.S. provisional application 60/850,774 by Ablynx N.V. entitled “Amino acid sequences that bind to serum proteins in a manner that is essentially independent of the pH, compounds comprising the same, and uses thereof”, filed on Oct. 11, 2006) and/or amino acid sequences that are conditional binders (see for example the U.S. provisional application 60/850,775 by Ablynx N.V. entitled “Amino acid sequences that bind to a desired molecule in a conditional manner”, filed on Oct. 11, 2006).

[0667] The at least one Nanobody may also be linked to one or more (preferably human) CH₁, CH₂ and/or CH₃ domains, optionally via a linker sequence. For instance, a Nanobody linked to a suitable CH₁ domain could for example be used—together with suitable light chains—to generate antibody fragments/structures analogous to conventional Fab fragments or F(ab′)2 fragments, but in which one or (in case of an F(ab′)2 fragment) one or both of the conventional V_{H} domains have been replaced by a Nanobody of the invention. Also, two Nanobodies could be linked to a CH3 domain (optionally via a linker) to provide a construct with increased half-life in vivo.

[0668] According to one specific embodiment of a polypeptide of the invention, one or more Nanobodies of the invention may be linked to one or more antibody parts, fragments or domains that confer one or more effector functions to the polypeptide of the invention and/or may confer the ability to bind to one or more Fc receptors. For example, for this purpose, and without being limited thereto, the one or more further amino acid sequences may comprise one or more CH₂ and/or CH₃ domains of an antibody, such as from a heavy chain antibody (as described herein) and more preferably from a conventional human 4-chain antibody; and/or may form (part of) and Fc region, for example from IgG, from IgE or from another human Ig. For example, WO 94/04678 describes heavy chain antibodies comprising a Camelid V_{HH} domain or a humanized derivative thereof (i.e. a Nanobody), in which the Camelidae CH₂ and/or CH₃ domain have been replaced by human CH₂ and CH₃ domains, so as to provide an immunoglobulin that consists of 2 heavy chains each comprising a Nanobody and human CH2 and CH3 domains (but no CH1 domain), which immunoglobulin has the effector function provided by the CH2 and CH3 domains and which immunoglobulin can function without the presence of any light chains. Other amino acid sequences that can be suitably linked to the Nanobodies of the invention so as to provide an effector function will be clear to the skilled person, and may be chosen on the basis of the desired effector function(s). Reference is for example made to WO 04/058820, WO 99/42077 and WO 05/017148, as well as the review by Holliger and Hudson, supra. Coupling of a Nanobody of the invention to an Fc portion may also lead to an increased half-life, compared to the corresponding Nanobody of the invention. For some applications, the use of an Fc portion and/or of constant domains (i.e. CH₂ and/or CH₃ domains) that confer increased half-life without any biologically significant effector function may also be suitable or even preferred. Other suitable constructs comprising one or more Nanobodies and one or more constant domains with increased half-life in vivo will be clear to the skilled person, and may for example comprise two Nanobodies linked to a CH3 domain, optionally via a linker sequence. Generally, any fusion protein or derivatives with increased half-life will preferably have a molecular weight of more than 50 kD, the cut-off value for renal absorption.

[0669] The further amino acid sequences may also form a signal sequence or leader sequence that directs secretion of the Nanobody or the polypeptide of the invention from a host cell upon synthesis (for example to provide a pre-, pro- or prepro-form of the polypeptide of the invention, depending on the host cell used to express the polypeptide of the invention).

[0670] The further amino acid sequence may also form a sequence or signal that allows the Nanobody or polypeptide of the invention to be directed towards and/or to penetrate or enter into specific organs, tissues, cells, or parts or compartments of cells, and/or that allows the Nanobody or polypeptide of the invention to penetrate or cross a biological barrier such as a cell membrane, a cell layer such as a layer of epithelial cells, a tumor including solid tumors, or the blood-brain-barrier. Suitable examples of such amino acid sequences will be clear to the skilled person, and for example include, but are not limited to, the “Peptrans” vectors mentioned above, the sequences described by Cardinale et al. and the amino acid sequences and antibody fragments known per se that can be used to express or produce the Nanobodies and polypeptides of the invention as so-called “intrabodies”, for example as described in WO 94/02610, WO 95/22618, U.S. Pat. No. 7,004,940, WO 03/014960, WO 99/07414; WO 05/01690; EP 1 512 696; and in Cattaneo, A. & Biocca, S. (1997) Intracellular Antibodies: Development and Applications. Landes and Springer-Verlag; and in Kontermann, Methods 34, (2004), 163-170, and the further references described therein.

[0671] For some applications, in particular for those applications in which it is intended to kill a cell that expresses the target against which the Nanobodies of the invention are directed (e.g. in the treatment of cancer), or to reduce or slow the growth and/or proliferation of such a cell, the Nanobodies of the invention may also be linked to a (cyto)toxic protein or polypeptide. Examples of such toxic proteins and polypeptides which can be linked to a Nanobody of the invention to provide—for example—a cytotoxic polypeptide of the invention will be clear to the skilled person and can for example be found in the prior art cited above and/or in the further description herein. One example is the so-called ADEPT™ technology described in WO 03/055527.

[0672] According to one preferred, but non-limiting embodiment, said one or more further amino acid sequences comprise at least one further Nanobody, so as to provide a polypeptide of the invention that comprises at least two, such as three, four, five or more Nanobodies, in which said Nanobodies may optionally be linked via one or more linker sequences (as defined herein). Polypeptides of the invention that comprise two or more Nanobodies, of which at least one is a Nanobody of the invention, will also be referred to herein as “multivalent” polypeptides of the invention, and the Nanobodies present in such polypeptides will also be referred to herein as being in a “multivalent format”. For example a “bivalent” polypeptide of the invention comprises two Nanobodies, optionally linked via a linker sequence, whereas a “trivalent” polypeptide of the invention comprises three Nanobodies, optionally linked via two linker sequences; etc.; in which at least one of the Nanobodies present in the polypeptide, and up to all of the Nanobodies present in the polypeptide, is/are a Nanobody of the invention.

[0673] In a multivalent polypeptide of the invention, the two or more Nanobodies may be the same or different, and may be directed against the same antigen or antigenic determinant (for example against the same part(s) or epitope(s) or against different parts or epitopes) or may alternatively be directed against different antigens or antigenic determinants; or any suitable combination thereof. For example, a bivalent polypeptide of the invention may comprise (a) two identical Nanobodies; (b) a first Nanobody directed against a first antigenic determinant of a protein or antigen and a second Nanobody directed against the same antigenic determinant of said protein or antigen which is different from the first Nanobody; (c) a first Nanobody directed against a first antigenic determinant of a protein or antigen and a second Nanobody directed against another antigenic determinant of said protein or antigen; or (d) a first Nanobody directed against a first protein or antigen and a second Nanobody directed against a second protein or antigen (i.e. different from said first antigen). Similarly, a trivalent polypeptide of the invention may, for example and without being limited thereto. comprise (a) three identical Nanobodies; (b) two identical Nanobody against a first antigenic determinant of an antigen and a third Nanobody directed against a different antigenic determinant of the same antigen; (c) two identical Nanobody against a first antigenic determinant of an antigen and a third Nanobody directed against a second antigen different from said first antigen; (d) a first Nanobody directed against a first antigenic determinant of a first antigen, a second Nanobody directed against a second antigenic determinant of said first antigen and a third Nanobody directed against a second antigen different from said first antigen; or (e) a first Nanobody directed against a first antigen, a second Nanobody directed against a second antigen different from said first antigen, and a third Nanobody directed against a third antigen different from said first and second antigen.

[0674] Polypeptides of the invention that contain at least two Nanobodies, in which at least one Nanobody is directed against a first antigen (i.e. against the IL-6 receptor) and at least one Nanobody is directed against a second antigen (i.e. different from the IL-6 receptor), will also be referred to as “multispecific” polypeptides of the invention, and the Nanobodies present in such polypeptides will also be referred to herein as being in a “multispecific format”. Thus, for example, a “bispecific” polypeptide of the invention is a polypeptide that comprises at least one Nanobody directed against a first antigen (i.e. the IL-6 receptor) and at least one further Nanobody directed against a second antigen (i.e. different from the IL-6 receptor), whereas a “trispecific” polypeptide of the invention is a polypeptide that comprises at least one Nanobody directed against a first antigen (i.e. the IL-6 receptor), at least one further Nanobody directed against a second antigen (i.e. different from the IL-6 receptor) and at least one further Nanobody directed against a third antigen (i.e. different from both the IL-6 receptor, and the second antigen); etc.

[0675] Accordingly, in its simplest form, a bispecific polypeptide of the invention is a bivalent polypeptide of the invention (as defined herein), comprising a first Nanobody directed against the IL-6 receptor, and a second Nanobody directed against a second antigen, in which said first and second Nanobody may optionally be linked via a linker sequence (as defined herein); whereas a trispecific polypeptide of the invention in its simplest form is a trivalent polypeptide of the invention (as defined herein), comprising a first Nanobody directed against the IL-6 receptor, a second Nanobody directed against a second antigen and a third Nanobody directed against a third antigen, in which said first, second and third Nanobody may optionally be linked via one or more, and in particular one and more in particular two, linker sequences.

[0676] Some preferred, but non-limiting examples of bivalent bispecific polypeptides of the invention are given in SEQ ID NO's: 450-471 and 559-602. Some preferred, but non-limiting examples of trivalent bispecific polypeptides of the invention are given in SEQ ID NO's: 478-558.

[0677] However, as will be clear from the description hereinabove, the invention is not limited thereto, in the sense that a multispecific polypeptide of the invention may comprise at least one Nanobody against the IL-6 receptor, and any number of Nanobodies directed against one or more antigens different from the IL-6 receptor.

[0678] Furthermore, although it is encompassed within the scope of the invention that the specific order or arrangement of the various Nanobodies in the polypeptides of the invention may have some influence on the properties of the final polypeptide of the invention (including but not limited to the affinity, specificity or avidity for the IL-6 receptor, or against the one or more other antigens), said order or arrangement is usually not critical and may be suitably chosen by the skilled person, optionally after some limited routine experiments based on the disclosure herein. Thus, when reference is made to a specific multivalent or multispecific polypeptide of the invention, it should be noted that this encompasses any order or arrangements of the relevant Nanobodies, unless explicitly indicated otherwise.

[0679] Finally, it is also within the scope of the invention that the polypeptides of the invention contain two or more Nanobodies and one or more further amino acid sequences (as mentioned herein).

[0680] For multivalent and multispecific polypeptides containing one or more V_{HH} domains and their preparation, reference is also made to Conrath et al., J. Biol. Chem., Vol. 276, 10. 7346-7350, 2001; Muyldermans, Reviews in Molecular Biotechnology 74 (2001), 277-302; as well as to for example WO 96/34103 and WO 99/23221. Some other examples of some specific multispecific and/or multivalent polypeptide of the invention can be found in the applications by Ablynx N.V. referred to herein.

[0681] One preferred, but non-limiting example of a multispecific polypeptide of the invention comprises at least one Nanobody of the invention and at least one Nanobody that provides for an increased half-life. Some preferred, but non-limiting examples of such Nanobodies include Nanobodies directed against serum proteins, such as human serum albumin, thyroxine-binding protein, (human) transferrin, fibrinogen, an immunoglobulin such as IgG, IgE or IgM, or one of the other serum proteins listed in WO 04/003019.

[0682] For example, for experiments in mice, Nanobodies against mouse serum albumin (MSA) can be used, whereas for pharmaceutical use, Nanobodies against human serum albumin can be used.

[0683] Another embodiment of the present invention is a polypeptide construct as described above wherein said at least one (human) serum protein is any of (human) serum albumin, (human) serum immunoglobulins, (human) thyroxine-binding protein, (human) transferrin, (human) fibrinogen, etc.

[0684] According to a specific, but non-limiting aspect of the invention, the polypeptides of the invention contain, besides the one or more Nanobodies of the invention, at least one

[0685] Nanobody against human serum albumin. Although these Nanobodies against human serum albumin may be as generally described in the applications by Ablynx N.V. cited above (see for example W04/062551), according to a particularly preferred, but non-limiting embodiment, said Nanobody against human serum albumin consists of 4 framework regions (FR1 to FR4 respectively) and 3 complementarity determining regions (CDR1 to CDR3 respectively), in which:
[0686] i) CDR1 is an amino acid sequence chosen from the group consisting of:

| | |
|---|---|
| SFGMS | [SEQ ID NO: 15] |
| LNLMG | [SEQ ID NO: 16] |
| INLLG | [SEQ ID NO: 17] |
| NYWMY; | [SEQ ID NO: 18] |

[0687] and/or from the group consisting of amino acid sequences that have 2 or only 1 “amino acid difference(s)” (as defined herein) with one of the above amino acid sequences, in which:

[0688] (1) any amino acid substitution is preferably a conservative amino acid substitution (as defined herein); and/or

[0689] (2) said amino acid sequence preferably only contains amino acid substitutions, and no amino acid deletions or insertions, compared to the above amino acid sequences;

[0690] and in which:
[0691] ii) CDR2 is an amino acid sequence chosen from the group consisting of:

| | |
|---|---|
| SISGSGSDTLYADSVKG | [SEQ ID NO: 19] |
| TITVGDSTNYADSVKG | [SEQ ID NO: 20] |
| TITVGDSTSYADSVKG | [SEQ ID NO: 21] |
| SINGRGDDTRYADSVKG | [SEQ ID NO: 22] |
| AISADSSTKNYADSVKG | [SEQ ID NO: 23] |
| AISADSSDKRYADSVKG | [SEQ ID NO: 24] |
| RISTGGGYSYYADSVKG | [SEQ ID NO: 25] |

[0692] or from the group consisting of amino acid sequences that have at least 80%, preferably at least 90%, more preferably at least 95%, even more preferably at least 99% sequence identity (as defined herein) with one of the above amino acid sequences; in which

[0693] (1) any amino acid substitution is preferably a conservative amino acid substitution (as defined herein); and/or

[0694] (2) said amino acid sequence preferably only contains amino acid substitutions, and no amino acid deletions or insertions, compared to the above amino acid sequences;

[0695] and/or from the group consisting of amino acid sequences that have 3, 2 or only 1 “amino acid difference(s)” (as defined herein) with one of the above amino acid sequences, in which:

[0696] (1) any amino acid substitution is preferably a conservative amino acid substitution (as defined herein); and/or

[0697] (2) said amino acid sequence preferably only contains amino acid substitutions, and no amino acid deletions or insertions, compared to the above amino acid sequences;

[0698] and in which:
[0699] iii) CDR3 is an amino acid sequence chosen from the group consisting of:

| | |
|---|---|
| DREAQVDTLDFDY | [SEQ ID NO: 26] |

[0700] or from the group consisting of amino acid sequences that have at least 80%, preferably at least 90%, more preferably at least 95%, even more preferably at least 99% sequence identity (as defined herein) with one of the above amino acid sequences; in which

[0701] (1) any amino acid substitution is preferably a conservative amino acid substitution (as defined herein); and/or

[0702] (2) said amino acid sequence preferably only contains amino acid substitutions, and no amino acid deletions or insertions, compared to the above amino acid sequences;

[0703] and/or from the group consisting of amino acid sequences that have 3, 2 or only 1 “amino acid difference(s)” (as defined herein) with one of the above amino acid sequences, in which:

[0704] (1) any amino acid substitution is preferably a conservative amino acid substitution (as defined herein); and/or

[0705] (2) said amino acid sequence preferably only contains amino acid substitutions, and no amino acid deletions or insertions, compared to the above amino acid sequences;

[0706] or from the group consisting of:

| | |
|---|---|
| GGSLSR | [SEQ ID NO: 27] |
| RRTWHSEL | [SEQ ID NO: 28] |
| GRSVSRS | [SEQ ID NO: 29] |
| GRGSP | [SEQ ID NO: 30] |

[0707] and/or from the group consisting of amino acid sequences that have 3, 2 or only 1 “amino acid difference(s)” (as defined herein) with one of the above amino acid sequences, in which:

[0708] (1) any amino acid substitution is preferably a conservative amino acid substitution (as defined herein); and/or

[0709] (2) said amino acid sequence preferably only contains amino acid substitutions, and no amino acid deletions or insertions, compared to the above amino acid sequences.

[0710] In another aspect, the invention relates to a Nanobody against human serum albumin, which consist of 4 framework regions (FR1 to FR4 respectively) and 3 complementarity determining regions (CDR1 to CDR3 respectively), which is chosen from the group consisting of Nanobodies with the one of the following combinations of CDR1, CDR2 and CDR3, respectively:

[0711] CDR1: SFGMS; CDR2: SISGSGSDTLYADSVKG; CDR3: GGSLSR;

[0712] CDR1: LNLMG; CDR2: TITVGDSTNYADSVKG; CDR3: RRTWHSEL;

[0713] CDR1: INLLG; CDR2: TITVGDSTSYADSVKG; CDR3: RRTWHSEL;

[0714] CDR1: SFGMS; CDR2: SINGRGDDTRYADSVKG; CDR3: GRSVSRS;

[0715] CDR1: SFGMS; CDR2: AISADSSDKRYADSVKG; CDR3: GRGSP;

[0716] CDR1: SFGMS; CDR2: AISADSSDKRYADSVKG; CDR3: GRGSP;

[0717] CDR1: NYWMY; CDR2: RISTGGGYSYYADSVKG; CDR3: DREAQVDTLDFDY.

[0718] In the Nanobodies of the invention that comprise the combinations of CDR's mentioned above, each CDR can be replaced by a CDR chosen from the group consisting of amino acid sequences that have at least 80%, preferably at least 90%, more preferably at least 95%, even more preferably at least 99% sequence identity (as defined herein) with the mentioned CDR's; in which

[0719] (1) any amino acid substitution is preferably a conservative amino acid substitution (as defined herein); and/or

[0720] (2) said amino acid sequence preferably only contains amino acid substitutions, and no amino acid deletions or insertions, compared to the above amino acid sequences;

[0721] and/or chosen from the group consisting of amino acid sequences that have 3, 2 or only 1 (as indicated in the preceding paragraph) “amino acid difference(s)” (as defined herein) with the mentioned CDR(s) one of the above amino acid sequences, in which:

[0722] (1) any amino acid substitution is preferably a conservative amino acid substitution (as defined herein); and/or

[0723] (2) said amino acid sequence preferably only contains amino acid substitutions, and no amino acid deletions or insertions, compared to the above amino acid sequences.

[0724] However, of the Nanobodies of the invention that comprise the combinations of CDR's mentioned above, Nanobodies comprising one or more of the CDR's listed above are particularly preferred; Nanobodies comprising two or more of the CDR's listed above are more particularly preferred; and Nanobodies comprising three of the CDR's listed above are most particularly preferred.

[0725] In these Nanobodies against human serum albumin, the Framework regions FR1 to FR4 are preferably as defined hereinabove for the Nanobodies of the invention.

[0726] Some preferred, but non-limiting examples of Nanobodies directed against human serum albumin that can be used in the polypeptides of the invention are listed in Table A-9 below. ALB-8 is a humanized version of ALB-1.

TABLE A-9

Preferred, but non-limiting examples of albumin-binding Nanobodies
<Name, SEQ ID #; PRT (protein); ->
Sequence

<PMP 6A6(ALB-1), SEQ ID NO: 32; PRT; ->
[sequence omitted]
<ALB-8(humanized ALB-1), SEQ ID NO: 33; PRT; ->
[sequence omitted]
<PMP 6A8(ALB-2), SEQ ID NO: 34; PRT; ->
AVQLVESGGGLVQGGGSLRLACAASERIFDLNLMGWYRQGPGNERELVATCITVGDSTNYADSVKG
RFTISMDYTKQTVYLHMNSLRPEDTGLYYCKIRRTWHSELWGQGTQVTVSS

[0727] Some preferred, but non-limiting examples of polypeptides of the invention that comprise at least one Nanobody against IL-6R and at least one Nanobody that provides for increased half-life are given in SEQ ID NO's 478 to 602.

[0728] Generally, any derivatives and/or polypeptides of the invention with increased half-life (for example pegylated Nanobodies or polypeptides of the invention, multispecific Nanobodies directed against the IL-6 receptor and (human) serum albumin, or Nanobodies fused to an Fc portion, all as described herein) have a half-life that is at least 1.5 times, preferably at least 2 times, such as at least 5 times, for example at least 10 times or more than 20 times, the half-life of the corresponding Nanobody of the invention.

[0729] Also, any derivatives or polypeptides of the invention with an increase half-life preferably have a half-life of more than 1 hour, preferably more than 2 hours, more preferably of more than 6 hours, such as of more than 12 hours, and for example of about one day, two days, one week, two weeks or three weeks, and preferably no more than 2 months, although the latter may be less critical.

[0730] Half-life can generally be defined as the time taken for the serum concentration of the polypeptide to be reduce by 50%, in vivo, for example due to degradation of the ligand and/or clearance or sequestration of the ligand by natural mechanisms. Methods for pharmacokinetic analysis and determination of half-life are familiar to those skilled in the art. Details may be found in Kenneth, A et al: Chemical Stability of Pharmaceuticals: A Handbook for Pharmacists and in Peters et al, Pharmacokinete analysis: A Practical Approach (1996). Reference is also made to “Pharmacokinetics”, M Gibaldi & D Perron, published by Marcel Dekker, 2 nd Rev. ex edition (1982).

[0731] According to one aspect of the invention the polypeptides are capable of binding to one or more molecules which can increase the half-life of the polypeptide in vivo.

[0732] The polypeptides of the invention are stabilised in vivo and their half-life increased by binding to molecules which resist degradation and/or clearance or sequestration. Typically, such molecules are naturally occurring proteins which themselves have a long half-life in vivo.

[0733] Another preferred, but non-limiting example of a multispecific polypeptide of the invention comprises at least one Nanobody of the invention and at least one Nanobody that directs the polypeptide of the invention towards, and/or that allows the polypeptide of the invention to penetrate or to enter into specific organs, tissues, cells, or parts or compartments of cells, and/or that allows the Nanobody to penetrate or cross a biological barrier such as a cell membrane, a cell layer such as a layer of epithelial cells, a tumor including solid tumors, or the blood-brain-barrier. Examples of such Nanobodies include Nanobodies that are directed towards specific cell-surface proteins, markers or epitopes of the desired organ, tissue or cell (for example cell-surface markers associated with tumor cells), and the single-domain brain targeting antibody fragments described in WO 02/057445, of which FC44 (SEQ ID NO 35) and FC5 (SEQ ID NO: 36) are preferred examples.

TABLE A-10

Sequence listing of FC44 and FC5
<Name, SEQ ID #; PRT (protein); ->
Sequence

< FC44, SEQ ID NO: 35; PRT; ->
EVQLQASGGGLVQAGGSLRLSCSASVRTFSIYAMGWFRQAPGKEREFVAGINRSGDVTKYADFVKG
RFSISRDNAKNMVYLQMNSLKPEDTALYYCAATWAYDTVGALTSGYNFWGQGTQVTVSS
< FC5, SEQ ID NO: 36; PRT; ->
EVQLQASGGGLVQAGGSLRLSCAASGFKITHYTMGWFRQAPGKEREFVSRITWGGDNTFYSNSVKG
RFTISRDNAKNTVYLQMNSLKPEDTADYYCAAGSTSTATPLRVDYWGKGTQVTVSS

[0734] In the polypeptides of the invention, the one or more Nanobodies and the one or more polypeptides may be directly linked to each other (as for example described in WO 99/23221) and/or may be linked to each other via one or more suitable spacers or linkers, or any combination thereof.

[0735] Suitable spacers or linkers for use in multivalent and multispecific polypeptides will be clear to the skilled person, and may generally be any linker or spacer used in the art to link amino acid sequences. Preferably, said linker or spacer is suitable for use in constructing proteins or polypeptides that are intended for pharmaceutical use.

[0736] Some particularly preferred spacers include the spacers and linkers that are used in the art to link antibody fragments or antibody domains. These include the linkers mentioned in the general background art cited above, as well as for example linkers that are used in the art to construct diabodies or ScFv fragments (in this respect, however, its should be noted that, whereas in diabodies and in ScFv fragments, the linker sequence used should have a length, a degree of flexibility and other properties that allow the pertinent V_{H} and V_{L} domains to come together to form the complete antigen-binding site, there is no particular limitation on the length or the flexibility of the linker used in the polypeptide of the invention, since each Nanobody by itself forms a complete antigen-binding site).

[0737] For example, a linker may be a suitable amino acid sequence, and in particular amino acid sequences of between 1 and 50, preferably between 1 and 30, such as between 1 and 10 amino acid residues. Some preferred examples of such amino acid sequences include gly-ser linkers, for example of the type (glyₓser_{y})_{z}, such as (for example (gly₄ser)₃ or (gly₃ser₂)₃, as described in WO 99/42077, hinge-like regions such as the hinge regions of naturally occurring heavy chain antibodies or similar sequences (such as described in WO 94/04678).

[0738] Some other particularly preferred linkers are poly-alanine (such as AAA), as well as the linkers mentioned in Table A-11, of which AAA, GS-7 and GS-9 are particularly preferred.

TABLE A-11
Sequence listing of linkers
<Name, SEQ ID #; PRT (protein); ->
Sequence

< GS30, SEQ ID NO: 37; PRT; ->
GGGGSGGGGSGGGGSGGGGSGGGGSGGGGS
< GS15, SEQ ID NO: 38; PRT; ->
GGGGSGGGGSGGGGS
< GS9, SEQ ID NO: 39; PRT; ->
GGGGSGGGS
< GS7, SEQ ID NO: 40; PRT; ->
SGGSGGS
< Llama upper long hinge region, SEQ ID NO: 41;
PRT; -> EPKTPKPQPAAA

[0739] Other suitable linkers generally comprise organic compounds or polymers, in particular those suitable for use in proteins for pharmaceutical use. For instance, poly(ethyleneglycol) moieties have been used to link antibody domains, see for example WO 04/081026.

[0740] It is encompassed within the scope of the invention that the length, the degree of flexibility and/or other properties of the linker(s) used (although not critical, as it usually is for linkers used in ScFv fragments) may have some influence on the properties of the final polypeptide of the invention, including but not limited to the affinity, specificity or avidity for The IL-6 receptor, or for one or more of the other antigens. Based on the disclosure herein, the skilled person will be able to determine the optimal linker(s) for use in a specific polypeptide of the invention, optionally after some limited routine experiments.

[0741] For example, in multivalent polypeptides of the invention that comprise Nanobodies directed against a multimeric antigen (such as a multimeric receptor or other protein), the length and flexibility of the linker are preferably such that it allows each Nanobody of the invention present in the polypeptide to bind to the antigenic determinant on each of the subunits of the multimer. Similarly, in a multispecific polypeptide of the invention that comprises Nanobodies directed against two or more different antigenic determinants on the same antigen (for example against different epitopes of an antigen and/or against different subunits of a multimeric receptor, channel or protein), the length and flexibility of the linker are preferably such that it allows each Nanobody to bind to its intended antigenic determinant. Again, based on the disclosure herein, the skilled person will be able to determine the optimal linker(s) for use in a specific polypeptide of the invention, optionally after some limited routine experiments.

[0742] It is also within the scope of the invention that the linker(s) used confer one or more other favourable properties or functionality to the polypeptides of the invention, and/or provide one or more sites for the formation of derivatives and/or for the attachment of functional groups (e.g. as described herein for the derivatives of the Nanobodies of the invention). For example, linkers containing one or more charged amino acid residues (see Table A-2 above) can provide improved hydrophilic properties, whereas linkers that form or contain small epitopes or tags can be used for the purposes of detection, identification and/or purification. Again, based on the disclosure herein, the skilled person will be able to determine the optimal linkers for use in a specific polypeptide of the invention, optionally after some limited routine experiments.

[0743] Finally, when two or more linkers are used in the polypeptides of the invention, these linkers may be the same or different. Again, based on the disclosure herein, the skilled person will be able to determine the optimal linkers for use in a specific polypeptide of the invention, optionally after some limited routine experiments.

[0744] Usually, for easy of expression and production, a polypeptide of the invention will be a linear polypeptide. However, the invention in its broadest sense is not limited thereto. For example, when a polypeptide of the invention comprises three of more Nanobodies, it is possible to link them by use of a linker with three or more “arms”, which each “arm” being linked to a Nanobody, so as to provide a “star-shaped” construct. It is also possible, although usually less preferred, to use circular constructs.

[0745] The invention also comprises derivatives of the polypeptides of the invention, which may be essentially analogous to the derivatives of the Nanobodies of the invention, i.e. as described herein.

[0746] The invention also comprises proteins or polypeptides that “essentially consist” of a polypeptide of the invention (in which the wording “essentially consist of” has essentially the same meaning as indicated hereinabove).

[0747] According to one embodiment of the invention, the polypeptide of the invention is in essentially isolated from, as defined herein.

[0748] The amino acid sequences, Nanobodies, polypeptides and nucleic acids of the invention can be prepared in a manner known per se, as will be clear to the skilled person from the further description herein. For example, the Nanobodies and polypeptides of the invention can be prepared in any manner known per se for the preparation of antibodies and in particular for the preparation of antibody fragments (including but not limited to (single) domain antibodies and ScFv fragments). Some preferred, but non-limiting methods for preparing the amino acid sequences, Nanobodies, polypeptides and nucleic acids include the methods and techniques described herein.

[0749] As will be clear to the skilled person, one particularly useful method for preparing an amino acid sequence, Nanobody and/or a polypeptide of the invention generally comprises the steps of:
[0750] the expression, in a suitable host cell or host organism (also referred to herein as a “host of the invention”) or in another suitable expression system of a nucleic acid that encodes said amino acid sequence, Nanobody or polypeptide of the invention (also referred to herein as a “nucleic acid of the invention”), optionally followed by:
[0751] isolating and/or purifying the amino acid sequence, Nanobody or polypeptide of the invention thus obtained.

[0752] In particular, such a method may comprise the steps of:
[0753] cultivating and/or maintaining a host of the invention under conditions that are such that said host of the invention expresses and/or produces at least one amino acid sequence, Nanobody and/or polypeptide of the invention; optionally followed by:
[0754] isolating and/or purifying the amino acid sequence, Nanobody or polypeptide of the invention thus obtained.

[0755] A nucleic acid of the invention can be in the form of single or double stranded DNA or RNA, and is preferably in the form of double stranded DNA. For example, the nucleotide sequences of the invention may be genomic DNA, cDNA or synthetic DNA (such as DNA with a codon usage that has been specifically adapted for expression in the intended host cell or host organism).

[0756] According to one embodiment of the invention, the nucleic acid of the invention is in essentially isolated from, as defined herein.

[0757] The nucleic acid of the invention may also be in the form of, be present in and/or be part of a vector, such as for example a plasmid, cosmid or YAC, which again may be in essentially isolated form.

[0758] The nucleic acids of the invention can be prepared or obtained in a manner known per se, based on the information on the amino acid sequences for the polypeptides of the invention given herein, and/or can be isolated from a suitable natural source. To provide analogs, nucleotide sequences encoding naturally occurring V_{HH} domains can for example be subjected to site-directed mutagenesis, so at to provide a nucleic acid of the invention encoding said analog. Also, as will be clear to the skilled person, to prepare a nucleic acid of the invention, also several nucleotide sequences, such as at least one nucleotide sequence encoding a Nanobody and for example nucleic acids encoding one or more linkers can be linked together in a suitable manner.

[0759] Techniques for generating the nucleic acids of the invention will be clear to the skilled person and may for instance include, but are not limited to, automated DNA synthesis; site-directed mutagenesis; combining two or more naturally occurring and/or synthetic sequences (or two or more parts thereof), introduction of mutations that lead to the expression of a truncated expression product; introduction of one or more restriction sites (e.g. to create cassettes and/or regions that may easily be digested and/or ligated using suitable restriction enzymes), and/or the introduction of mutations by means of a PCR reaction using one or more “mismatched” primers, using for example a sequence of a naturally occurring GPCR ???? as a template. These and other techniques will be clear to the skilled person, and reference is again made to the standard handbooks, such as Sambrook et al. and Ausubel et al., mentioned above, as well as the Examples below.

[0760] The nucleic acid of the invention may also be in the form of, be present in and/or be part of a genetic construct, as will be clear to the person skilled in the art. Such genetic constructs generally comprise at least one nucleic acid of the invention that is optionally linked to one or more elements of genetic constructs known per se, such as for example one or more suitable regulatory elements (such as a suitable promoter(s), enhancer(s), terminator(s), etc.) and the further elements of genetic constructs referred to herein. Such genetic constructs comprising at least one nucleic acid of the invention will also be referred to herein as “genetic constructs of the invention”.

[0761] The genetic constructs of the invention may be DNA or RNA, and are preferably double-stranded DNA. The genetic constructs of the invention may also be in a form suitable for transformation of the intended host cell or host organism, in a form suitable for integration into the genomic DNA of the intended host cell or in a form suitable for independent replication, maintenance and/or inheritance in the intended host organism. For instance, the genetic constructs of the invention may be in the form of a vector, such as for example a plasmid, cosmid, YAC, a viral vector or transposon. In particular, the vector may be an expression vector, i.e. a vector that can provide for expression in vitro and/or in vivo (e.g. in a suitable host cell, host organism and/or expression system).

[0762] In a preferred but non-limiting embodiment, a genetic construct of the invention comprises
[0763] a) at least one nucleic acid of the invention; operably connected to
[0764] b) one or more regulatory elements, such as a promoter and optionally a suitable terminator;
   and optionally also
[0765] c) one or more further elements of genetic constructs known per se;

[0766] in which the terms “regulatory element”, “promoter”, “terminator” and “operably connected” have their usual meaning in the art (as further described herein); and in which said “further elements” present in the genetic constructs may for example be 3′- or 5′-UTR sequences, leader sequences, selection markers, expression markers/reporter genes, and/or elements that may facilitate or increase (the efficiency of) transformation or integration. These and other suitable elements for such genetic constructs will be clear to the skilled person, and may for instance depend upon the type of construct used, the intended host cell or host organism; the manner in which the nucleotide sequences of the invention of interest are to be expressed (e.g. via constitutive, transient or inducible expression); and/or the transformation technique to be used. For example, regulatory sequences, promoters and terminators known per se for the expression and production of antibodies and antibody fragments (including but not limited to (single) domain antibodies and ScFv fragments) may be used in an essentially analogous manner.

[0767] Preferably, in the genetic constructs of the invention, said at least one nucleic acid of the invention and said regulatory elements, and optionally said one or more further elements, are “operably linked” to each other, by which is generally meant that they are in a functional relationship with each other. For instance, a promoter is considered “operably linked” to a coding sequence if said promoter is able to initiate or otherwise control/regulate the transcription and/or the expression of a coding sequence (in which said coding sequence should be understood as being “under the control of” said promotor). Generally, when two nucleotide sequences are operably linked, they will be in the same orientation and usually also in the same reading frame. They will usually also be essentially contiguous, although this may also not be required.

[0768] Preferably, the regulatory and further elements of the genetic constructs of the invention are such that they are capable of providing their intended biological function in the intended host cell or host organism.

[0769] For instance, a promoter, enhancer or terminator should be “operable” in the intended host cell or host organism, by which is meant that (for example) said promoter should be capable of initiating or otherwise controlling/regulating the transcription and/or the expression of a nucleotide sequence—e.g. a coding sequence—to which it is operably linked (as defined herein).

[0770] Some particularly preferred promoters include, but are not limited to, promoters known per se for the expression in the host cells mentioned herein; and in particular promoters for the expression in the bacterial cells, such as those mentioned herein and/or those used in the Examples.

[0771] A selection marker should be such that it allows—i.e. under appropriate selection conditions—host cells and/or host organisms that have been (successfully) transformed with the nucleotide sequence of the invention to be distinguished from host cells/organisms that have not been (successfully) transformed. Some preferred, but non-limiting examples of such markers are genes that provide resistance against antibiotics (such as kanamycin or ampicillin), genes that provide for temperature resistance, or genes that allow the host cell or host organism to be maintained in the absence of certain factors, compounds and/or (food) components in the medium that are essential for survival of the non-transformed cells or organisms.

[0772] A leader sequence should be such that—in the intended host cell or host organism—it allows for the desired post-translational modifications and/or such that it directs the transcribed mRNA to a desired part or organelle of a cell. A leader sequence may also allow for secretion of the expression product from said cell. As such, the leader sequence may be any pro-, pre-, or prepro-sequence operable in the host cell or host organism. Leader sequences may not be required for expression in a bacterial cell. For example, leader sequences known per se for the expression and production of antibodies and antibody fragments (including but not limited to single domain antibodies and ScFv fragments) may be used in an essentially analogous manner.

[0773] An expression marker or reporter gene should be such that—in the host cell or host organism—it allows for detection of the expression of (a gene or nucleotide sequence present on) the genetic construct. An expression marker may optionally also allow for the localisation of the expressed product, e.g. in a specific part or organelle of a cell and/or in (a) specific cell(s), tissue(s), organ(s) or part(s) of a multicellular organism. Such reporter genes may also be expressed as a protein fusion with the amino acid sequence of the invention. Some preferred, but non-limiting examples include fluorescent proteins such as GFP.

[0774] Some preferred, but non-limiting examples of suitable promoters, terminator and further elements include those that can be used for the expression in the host cells mentioned herein; and in particular those that are suitable for expression in bacterial cells, such as those mentioned herein and/or those used in the Examples below. For some (further) non-limiting examples of the promoters, selection markers, leader sequences, expression markers and further elements that may be present/used in the genetic constructs of the invention—such as terminators, transcriptional and/or translational enhancers and/or integration factors—reference is made to the general handbooks such as Sambrook et al. and Ausubel et al. mentioned above, as well as to the examples that are given in WO 95/07463, WO 96/23810, WO 95/07463, WO 95/21191, WO 97/11094, WO 97/42320, WO 98/06737, WO 98/21355, U.S. Pat. No. 7,207,410, U.S. Pat. No. 5,693,492 and EP 1 085 089. Other examples will be clear to the skilled person. Reference is also made to the general background art cited above and the further references cited herein.

[0775] The genetic constructs of the invention may generally be provided by suitably linking the nucleotide sequence(s) of the invention to the one or more further elements described above, for example using the techniques described in the general handbooks such as Sambrook et al. and Ausubel et al., mentioned above.

[0776] Often, the genetic constructs of the invention will be obtained by inserting a nucleotide sequence of the invention in a suitable (expression) vector known per se. Some preferred, but non-limiting examples of suitable expression vectors are those used in the Examples below, as well as those mentioned herein.

[0777] The nucleic acids of the invention and/or the genetic constructs of the invention may be used to transform a host cell or host organism, i.e. for expression and/or production of the amino acid sequence, Nanobody or polypeptide of the invention. Suitable hosts or host cells will be clear to the skilled person, and may for example be any suitable fungal, prokaryotic or eukaryotic cell or cell line or any suitable fungal, prokaryotic or eukaryotic organism, for example:
[0778] a bacterial strain, including but not limited to gram-negative strains such as strains of Escherichia coli; of Proteus, for example of Proteus mirabilis; of Pseudomonas, for example of Pseudomonas fluorescens; and gram-positive strains such as strains of Bacillus, for example of Bacillus subtilis or of Bacillus brevis; of Streptomyces, for example of Streptomyces lividans; of Staphylococcus, for example of Staphylococcus carnosus; and of Lactococcus, for example of Lactococcus lactis;
[0779] a fungal cell, including but not limited to cells from species of Trichoderma, for example from Trichoderma reesei; of Neurospora, for example from Neurospora crassa; of Sordaria, for example from Sordaria macrospora; of Aspergillus, for example from Aspergillus niger or from Aspergillus sojae; or from other filamentous fungi;
[0780] a yeast cell, including but not limited to cells from species of Saccharomyces, for example of Saccharomyces cerevisiae; of Schizosaccharomyces, for example of Schizosaccharomyces pombe; of Pichia, for example of Pichia pastoris or of Pichia methanolica; of Hansenula, for example of Hansenula polymorpha; of Kluyveromyces, for example of Kluyveromyces lactis; of Arxula, for example of Arxula adeninivorans; of Yarrowia, for example of Yarrowia lipolytica;
[0781] an amphibian cell or cell line, such as Xenopus oocytes;
[0782] an insect-derived cell or cell line, such as cells/cell lines derived from lepidoptera, including but not limited to Spodoptera SF9 and Sf21 cells or cells/cell lines derived from Drosophila, such as Schneider and Kc cells;
[0783] a plant or plant cell, for example in tobacco plants; and/or
[0784] a mammalian cell or cell line, for example a cell or cell line derived from a human, a cell or a cell line from mammals including but not limited to CHO-cells, BHK-cells (for example BHK-21 cells) and human cells or cell lines such as HeLa, COS (for example COS-7) and PER.C6 cells;

[0785] as well as all other hosts or host cells known per se for the expression and production of antibodies and antibody fragments (including but not limited to (single) domain antibodies and ScFv fragments), which will be clear to the skilled person. Reference is also made to the general background art cited hereinabove, as well as to for example WO 94/29457; WO 96/34103; WO 99/42077; Frenken et al., (1998), supra; Riechmann and Muyldermans, (1999), supra; van der Linden, (2000), supra; Thomassen et al., (2002), supra; Joosten et al., (2003), supra; Joosten et al., (2005), supra; and the further references cited herein.

[0786] The amino acid sequences, Nanobodies and polypeptides of the invention can also be introduced and expressed in one or more cells, tissues or organs of a multicellular organism, for example for prophylactic and/or therapeutic purposes (e.g. as a gene therapy). For this purpose, the nucleotide sequences of the invention may be introduced into the cells or tissues in any suitable way, for example as such (e.g. using liposomes) or after they have been inserted into a suitable gene therapy vector (for example derived from retroviruses such as adenovirus, or parvoviruses such as adeno-associated virus). As will also be clear to the skilled person, such gene therapy may be performed in vivo and/or in situ in the body of a patient by administering a nucleic acid of the invention or a suitable gene therapy vector encoding the same to the patient or to specific cells or a specific tissue or organ of the patient; or suitable cells (often taken from the body of the patient to be treated, such as explanted lymphocytes, bone marrow aspirates or tissue biopsies) may be treated in vitro with a nucleotide sequence of the invention and then be suitably (re-)introduced into the body of the patient. All this can be performed using gene therapy vectors, techniques and delivery systems which are well known to the skilled person, and for example described in Culver, K. W., “Gene Therapy”, 1994, p. xii, Mary Ann Liebert, Inc., Publishers, New York, N.Y.); Giordano, Nature F Medicine 2 (1996), 534-539; Schaper, Circ. Res. 79 (1996), 911-919; Anderson, Science 256 (1992), 808-813; Verma, Nature 389 (1994), 239; Isner, Lancet 348 (1996), 370-374; Muhlhauser, Circ. Res. 77 (1995), 1077-1086; Onodera, Blood 91; (1998), 30-36; Verma, Gene Ther. 5 (1998), 692-699; Nabel, Ann. N.Y. Acad. Sci.: 811 (1997), 289-292; Verzeletti, Hum. Gene Ther. 9 (1998), 2243-51; Wang, Nature Medicine 2 (1996), 714-716; WO 94/29469; WO 97/00957, U.S. Pat. No. 5,580,859; U.S. Pat. No. 55,895,466; or Schaper, Current Opinion in Biotechnology 7 (1996), 635-640. For example, in situ expression of ScFv fragments (Afanasieva et al., Gene Ther., 10, 1850-1859 (2003)) and of diabodies (Blanco et al., J. Immunol, 171, 1070-1077 (2003)) has been described in the art.

[0787] For expression of the Nanobodies in a cell, they may also be expressed as so-called “intrabodies”, as for example described in WO 94/02610, WO 95/22618 and U.S. Pat. No. 7,004,940; WO 03/014960; in Cattaneo, A. & Biocca, S. (1997) Intracellular Antibodies: Development and Applications. Landes and Springer-Verlag; and in Kontermann, Methods 34, (2004), 163-170.

[0788] The amino acid sequences, Nanobodies and polypeptides of the invention can for example also be produced in the milk of transgenic mammals, for example in the milk of rabbits, cows, goats or sheep (see for example U.S. Pat. No. 6,741,957, U.S. Pat. No. 6,304,489 and U.S. Pat. No. 6,849,992 for general techniques for introducing transgenes into mammals), in plants or parts of plants including but not limited to their leaves, flowers, fruits, seed, roots or turbers (for example in tobacco, maize, soybean or alfalfa) or in for example pupae of the silkworm Bombix mori.

[0789] Furthermore, the amino acid sequences, Nanobodies and polypeptides of the invention can also be expressed and/or produced in cell-free expression systems, and suitable examples of such systems will be clear to the skilled person. Some preferred, but non-limiting examples include expression in the wheat germ system; in rabbit reticulocyte lysates; or in the E. coli Zubay system.

[0790] As mentioned above, one of the advantages of the use of Nanobodies is that the polypeptides based thereon can be prepared through expression in a suitable bacterial system, and suitable bacterial expression systems, vectors, host cells, regulatory elements, etc., will be clear to the skilled person, for example from the references cited above. It should however be noted that the invention in its broadest sense is not limited to expression in bacterial systems.

[0791] Preferably, in the invention, an (in vivo or in vitro) expression system, such as a bacterial expression system, is used that provides the polypeptides of the invention in a form that is suitable for pharmaceutical use, and such expression systems will again be clear to the skilled person. As also will be clear to the skilled person, polypeptides of the invention suitable for pharmaceutical use can be prepared using techniques for peptide synthesis.

[0792] For production on industrial scale, preferred heterologous hosts for the (industrial) production of Nanobodies or Nanobody-containing protein therapeutics include strains of E. coli, Pichia pastoris, S. cerevisiae that are suitable for large scale expression/production/fermentation, and in particular for large scale pharmaceutical expression/production/fermentation. Suitable examples of such strains will be clear to the skilled person. Such strains and production/expression systems are also made available by companies such as Biovitrum (Uppsala, Sweden).

[0793] Alternatively, mammalian cell lines, in particular Chinese hamster ovary (CHO) cells, can be used for large scale expression/production/fermentation, and in particular for large scale pharmaceutical expression/production/fermentation. Again, such expression/production systems are also made available by some of the companies mentioned above.

[0794] The choice of the specific expression system would depend in part on the requirement for certain post-translational modifications, more specifically glycosylation. The production of a Nanobody-containing recombinant protein for which glycosylation is desired or required would necessitate the use of mammalian expression hosts that have the ability to glycosylate the expressed protein. In this respect, it will be clear to the skilled person that the glycosylation pattern obtained (i.e. the kind, number and position of residues attached) will depend on the cell or cell line that is used for the expression. Preferably, either a human cell or cell line is used (i.e. leading to a protein that essentially has a human glycosylation pattern) or another mammalian cell line is used that can provide a glycosylation pattern that is essentially and/or functionally the same as human glycosylation or at least mimics human glycosylation. Generally, prokaryotic hosts such as E. coli do not have the ability to glycosylate proteins, and the use of lower eukaryotes such as yeast usually leads to a glycosylation pattern that differs from human glycosylation. Nevertheless, it should be understood that all the foregoing host cells and expression systems can be used in the invention, depending on the desired amino acid sequence, Nanobody or polypeptide to be obtained.

[0795] Thus, according to one non-limiting embodiment of the invention, the amino acid sequence, Nanobody or polypeptide of the invention is glycosylated. According to another non-limiting embodiment of the invention, the amino acid sequence, Nanobody or polypeptide of the invention is non-glycosylated.

[0796] According to one preferred, but non-limiting embodiment of the invention, the amino acid sequence, Nanobody or polypeptide of the invention is produced in a bacterial cell, in particular a bacterial cell suitable for large scale pharmaceutical production, such as cells of the strains mentioned above.

[0797] According to another preferred, but non-limiting embodiment of the invention, the amino acid sequence, Nanobody or polypeptide of the invention is produced in a yeast cell, in particular a yeast cell suitable for large scale pharmaceutical production, such as cells of the species mentioned above.

[0798] According to yet another preferred, but non-limiting embodiment of the invention, the amino acid sequence, Nanobody or polypeptide of the invention is produced in a mammalian cell, in particular in a human cell or in a cell of a human cell line, and more in particular in a human cell or in a cell of a human cell line that is suitable for large scale pharmaceutical production, such as the cell lines mentioned hereinabove.

[0799] When expression in a host cell is used to produce the amino acid sequences, Nanobodies and the polypeptides of the invention, the amino acid sequences Nanobodies and polypeptides of the invention can be produced either intracellullarly (e.g. in the cytosol, in the periplasma or in inclusion bodies) and then isolated from the host cells and optionally further purified; or can be produced extracellularly (e.g. in the medium in which the host cells are cultured) and then isolated from the culture medium and optionally further purified. When eukaryotic host cells are used, extracellular production is usually preferred since this considerably facilitates the further isolation and downstream processing of the Nanobodies and proteins obtained. Bacterial cells such as the strains of E. coli mentioned above normally do not secrete proteins extracellularly, except for a few classes of proteins such as toxins and hemolysin, and secretory production in E. coli refers to the translocation of proteins across the inner membrane to the periplasmic space. Periplasmic production provides several advantages over cytosolic production. For example, the N-terminal amino acid sequence of the secreted product can be identical to the natural gene product after cleavage of the secretion signal sequence by a specific signal peptidase. Also, there appears to be much less protease activity in the periplasm than in the cytoplasm. In addition, protein purification is simpler due to fewer contaminating proteins in the periplasm. Another advantage is that correct disulfide bonds may form because the periplasm provides a more oxidative environment than the cytoplasm. Proteins overexpressed in E. coli are often found in insoluble aggregates, so-called inclusion bodies. These inclusion bodies may be located in the cytosol or in the periplasm; the recovery of biologically active proteins from these inclusion bodies requires a denaturation/refolding process. Many recombinant proteins, including therapeutic proteins, are recovered from inclusion bodies. Alternatively, as will be clear to the skilled person, recombinant strains of bacteria that have been genetically modified so as to secrete a desired protein, and in particular a amino acid sequence, Nanobody or a polypeptide of the invention, can be used.

[0800] Thus, according to one non-limiting embodiment of the invention, the amino acid sequence, Nanobody or polypeptide of the invention is an amino acid sequence, Nanobody or polypeptide that has been produced intracellularly and that has been isolated from the host cell, and in particular from a bacterial cell or from an inclusion body in a bacterial cell. According to another non-limiting embodiment of the invention, the amino acid sequence, Nanobody or polypeptide of the invention is an amino acid sequence, Nanobody or polypeptide that has been produced extracellularly, and that has been isolated from the medium in which the host cell is cultivated.

[0801] Some preferred, but non-limiting promoters for use with these host cells include,
[0802] for expression in E. coli: lac promoter (and derivatives thereof such as the lacUV5 promoter); arabinose promoter; left-(PL) and rightward (PR) promoter of phage lambda; promoter of the trp operon; hybrid lac/trp promoters (tac and trc); T7-promoter (more specifically that of T7-phage gene 10) and other T-phage promoters; promoter of the Tn10 tetracycline resistance gene; engineered variants of the above promoters that include one or more copies of an extraneous regulatory operator sequence;
[0803] for expression in S. cerevisiae: constitutive: ADH1 (alcohol dehydrogenase 1), ENO (enolase), CYC1 (cytochrome c iso-1), GAPDH (glyceraldehydes-3-phosphate dehydrogenase), PGK1 (phosphoglycerate kinase), PYK1 (pyruvate kinase); regulated: GAL1,10,7 (galactose metabolic enzymes), ADH2 (alcohol dehydrogenase 2), PHOS (acid phosphatase), CUP1 (copper metallothionein); heterologous: CaMV (cauliflower mosaic virus ³⁵S promoter);
[0804] for expression in Pichia pastoris: the AOX1 promoter (alcohol oxidase I);
[0805] for expression in mammalian cells: human cytomegalovirus (hCMV) immediate early enhancer/promoter; human cytomegalovirus (hCMV) immediate early promoter variant that contains two tetracycline operator sequences such that the promoter can be regulated by the Tet repressor; Herpes Simplex Virus thymidine kinase (TK) promoter; Rous Sarcoma Virus long terminal repeat (RSV LTR) enhancer/promoter; elongation factor 1α (hEF-1α) promoter from human, chimpanzee, mouse or rat; the SV40 early promoter; HIV-1 long terminal repeat promoter, β-actin promoter;

[0806] Some preferred, but non-limiting vectors for use with these host cells include:
[0807] vectors for expression in mammalian cells: pMAMneo (Clontech), pcDNA3 (Invitrogen), pMC1neo (Stratagene), pSG5 (Stratagene), EBO-pSV2-neo (ATCC 37593), pBPV-1 (8-2) (ATCC 37110), pdBPV-MMTneo (342-12) (ATCC 37224), pRSVgpt (ATCC37199), pRSVneo (ATCC37198), pSV2-dhfr (ATCC 37146), pUCTag (ATCC 37460) and 1ZD35 (ATCC 37565), as well as viral-based expression systems, such as those based on adenovirus;
[0808] vectors for expression in bacterial cells: pET vectors (Novagen) and pQE vectors (Qiagen);
[0809] vectors for expression in yeast or other fungal cells: pYES2 (Invitrogen) and Pichia expression vectors (Invitrogen);
[0810] vectors for expression in insect cells: pBlueBacII (Invitrogen) and other baculovirus vectors
[0811] vectors for expression in plants or plant cells: for example vectors based on cauliflower mosaic virus or tobacco mosaic virus, suitable strains of Agrobacterium, or Ti-plasmid based vectors.

[0812] Some preferred, but non-limiting secretory sequences for use with these host cells include:
[0813] for use in bacterial cells such as E. coli: PelB, Bla, OmpA, OmpC, OmpF, OmpT, StII, PhoA, PhoE, MalE, Lpp, LamB, and the like; TAT signal peptide, hemolysin C-terminal secretion signal;
[0814] for use in yeast: α-mating factor prepro-sequence, phosphatase (pho1), invertase (Suc), etc.;
[0815] for use in mammalian cells: indigenous signal in case the target protein is of eukaryotic origin; murine Ig κ-chain V-J2-C signal peptide; etc.

[0816] Suitable techniques for transforming a host or host cell of the invention will be clear to the skilled person and may depend on the intended host cell/host organism and the genetic construct to be used. Reference is again made to the handbooks and patent applications mentioned above.

[0817] After transformation, a step for detecting and selecting those host cells or host organisms that have been successfully transformed with the nucleotide sequence/genetic construct of the invention may be performed. This may for instance be a selection step based on a selectable marker present in the genetic construct of the invention or a step involving the detection of the amino acid sequence of the invention, e.g. using specific antibodies.

[0818] The transformed host cell (which may be in the form or a stable cell line) or host organisms (which may be in the form of a stable mutant line or strain) form further aspects of the present invention.

[0819] Preferably, these host cells or host organisms are such that they express, or are (at least) capable of expressing (e.g. under suitable conditions), an amino acid sequence, Nanobody or polypeptide of the invention (and in case of a host organism: in at least one cell, part, tissue or organ thereof). The invention also includes further generations, progeny and/or offspring of the host cell or host organism of the invention, that may for instance be obtained by cell division or by sexual or asexual reproduction.

[0820] To produce/obtain expression of the amino acid sequences of the invention, the transformed host cell or transformed host organism may generally be kept, maintained and/or cultured under conditions such that the (desired) amino acid sequence, Nanobody or polypeptide of the invention is expressed/produced. Suitable conditions will be clear to the skilled person and will usually depend upon the host cell/host organism used, as well as on the regulatory elements that control the expression of the (relevant) nucleotide sequence of the invention. Again, reference is made to the handbooks and patent applications mentioned above in the paragraphs on the genetic constructs of the invention.

[0821] Generally, suitable conditions may include the use of a suitable medium, the presence of a suitable source of food and/or suitable nutrients, the use of a suitable temperature, and optionally the presence of a suitable inducing factor or compound (e.g. when the nucleotide sequences of the invention are under the control of an inducible promoter); all of which may be selected by the skilled person. Again, under such conditions, the amino acid sequences of the invention may be expressed in a constitutive manner, in a transient manner, or only when suitably induced.

[0822] It will also be clear to the skilled person that the amino acid sequence, Nanobody or polypeptide of the invention may (first) be generated in an immature form (as mentioned above), which may then be subjected to post-translational modification, depending on the host cell/host organism used. Also, the amino acid sequence, Nanobody or polypeptide of the invention may be glycosylated, again depending on the host cell/host organism used.

[0823] The amino acid sequence, Nanobody or polypeptide of the invention may then be isolated from the host cell/host organism and/or from the medium in which said host cell or host organism was cultivated, using protein isolation and/or purification techniques known per se, such as (preparative) chromatography and/or electrophoresis techniques, differential precipitation techniques, affinity techniques (e.g. using a specific, cleavable amino acid sequence fused with the amino acid sequence, Nanobody or polypeptide of the invention) and/or preparative immunological techniques (i.e. using antibodies against the amino acid sequence to be isolated).

[0824] Generally, for pharmaceutical use, the polypeptides of the invention may be formulated as a pharmaceutical preparation or compositions comprising at least one polypeptide of the invention and at least one pharmaceutically acceptable carrier, diluent or excipient and/or adjuvant, and optionally one or more further pharmaceutically active polypeptides and/or compounds. By means of non-limiting examples, such a formulation may be in a form suitable for oral administration, for parenteral administration (such as by intravenous, intramuscular or subcutaneous injection or intravenous infusion), for topical administration, for administration by inhalation, by a skin patch, by an implant, by a suppository, etc. Such suitable administration forms—which may be solid, semi-solid or liquid, depending on the manner of administration—as well as methods and carriers for use in the preparation thereof, will be clear to the skilled person, and are further described herein.

[0825] Thus, in a further aspect, the invention relates to a pharmaceutical composition that contains at least one amino acid of the invention, at least one Nanobody of the invention or at least one polypeptide of the invention and at least one suitable carrier, diluent or excipient (i.e. suitable for pharmaceutical use), and optionally one or more further active substances.

[0826] Generally, the amino acid sequences, Nanobodies and polypeptides of the invention can be formulated and administered in any suitable manner known per se, for which reference is for example made to the general background art cited above (and in particular to WO 04/041862, WO 04/041863, WO 04/041865 and WO 04/041867) as well as to the standard handbooks, such as Remington's Pharmaceutical Sciences, 18^{th} Ed., Mack Publishing Company, USA (1990) or Remington, the Science and Practice of Pharmacy, 21th Edition, Lippincott Williams and Wilkins (2005).

[0827] For example, the amino acid sequences, Nanobodies and polypeptides of the invention may be formulated and administered in any manner known per se for conventional antibodies and antibody fragments (including ScFv's and diabodies) and other pharmaceutically active proteins. Such formulations and methods for preparing the same will be clear to the skilled person, and for example include preparations suitable for parenteral administration (for example intravenous, intraperitoneal, subcutaneous, intramuscular, intraluminal, intra-arterial or intrathecal administration) or for topical (i.e. transdermal or intradermal) administration.

[0828] Preparations for parenteral administration may for example be sterile solutions, suspensions, dispersions or emulsions that are suitable for infusion or injection. Suitable carriers or diluents for such preparations for example include, without limitation, sterile water and aqueous buffers and solutions such as physiological phosphate-buffered saline, Ringer's solutions, dextrose solution, and Hank's solution; water oils; glycerol; ethanol; glycols such as propylene glycol or as well as mineral oils, animal oils and vegetable oils, for example peanut oil, soybean oil, as well as suitable mixtures thereof. Usually, aqueous solutions or suspensions will be preferred.

[0829] The amino acid sequences, Nanobodies and polypeptides of the invention can also be administered using gene therapy methods of delivery. See, e.g., U.S. Pat. No. 5,399,346, which is incorporated by reference in its entirety. Using a gene therapy method of delivery, primary cells transfected with the gene encoding an amino acid sequence, Nanobody or polypeptide of the invention can additionally be transfected with tissue specific promoters to target specific organs, tissue, grafts, tumors, or cells and can additionally be transfected with signal and stabilization sequences for subcellularly localized expression.

[0830] Thus, the amino acid sequences, Nanobodies and polypeptides of the invention may be systemically administered, e.g., orally, in combination with a pharmaceutically acceptable vehicle such as an inert diluent or an assimilable edible carrier. They may be enclosed in hard or soft shell gelatin capsules, may be compressed into tablets, or may be incorporated directly with the food of the patient's diet. For oral therapeutic administration, the amino acid sequences, Nanobodies and polypeptides of the invention may be combined with one or more excipients and used in the form of ingestible tablets, buccal tablets, troches, capsules, elixirs, suspensions, syrups, wafers, and the like. Such compositions and preparations should contain at least 0.1% of the amino acid sequence, Nanobody or polypeptide of the invention. Their percentage in the compositions and preparations may, of course, be varied and may conveniently be between about 2 to about 60% of the weight of a given unit dosage form. The amount of the amino acid sequence, Nanobody or polypeptide of the invention in such therapeutically useful compositions is such that an effective dosage level will be obtained.

[0831] The tablets, troches, pills, capsules, and the like may also contain the following: binders such as gum tragacanth, acacia, corn starch or gelatin; excipients such as dicalcium phosphate; a disintegrating agent such as corn starch, potato starch, alginic acid and the like; a lubricant such as magnesium stearate; and a sweetening agent such as sucrose, fructose, lactose or aspartame or a flavoring agent such as peppermint, oil of wintergreen, or cherry flavoring may be added. When the unit dosage form is a capsule, it may contain, in addition to materials of the above type, a liquid carrier, such as a vegetable oil or a polyethylene glycol. Various other materials may be present as coatings or to otherwise modify the physical form of the solid unit dosage form. For instance, tablets, pills, or capsules may be coated with gelatin, wax, shellac or sugar and the like. A syrup or elixir may contain the amino acid sequences, Nanobodies and polypeptides of the invention, sucrose or fructose as a sweetening agent, methyl and propylparabens as preservatives, a dye and flavoring such as cherry or orange flavor. Of course, any material used in preparing any unit dosage form should be pharmaceutically acceptable and substantially non-toxic in the amounts employed. In addition, the amino acid sequences, Nanobodies and polypeptides of the invention may be incorporated into sustained-release preparations and devices.

[0832] Preparations and formulations for oral administration may also be provided with an enteric coating that will allow the constructs of the invention to resist the gastric environment and pass into the intestines. More generally, preparations and formulations for oral administration may be suitably formulated for delivery into any desired part of the gastrointestinal tract. In addition, suitable suppositories may be used for delivery into the gastrointestinal tract.

[0833] The amino acid sequences, Nanobodies and polypeptides of the invention may also be administered intravenously or intraperitoneally by infusion or injection. Solutions of the amino acid sequences, Nanobodies and polypeptides of the invention or their salts can be prepared in water, optionally mixed with a nontoxic surfactant. Dispersions can also be prepared in glycerol, liquid polyethylene glycols, triacetin, and mixtures thereof and in oils. Under ordinary conditions of storage and use, these preparations contain a preservative to prevent the growth of microorganisms.

[0834] The pharmaceutical dosage forms suitable for injection or infusion can include sterile aqueous solutions or dispersions or sterile powders comprising the active ingredient which are adapted for the extemporaneous preparation of sterile injectable or infusible solutions or dispersions, optionally encapsulated in liposomes. In all cases, the ultimate dosage form must be sterile, fluid and stable under the conditions of manufacture and storage. The liquid carrier or vehicle can be a solvent or liquid dispersion medium comprising, for example, water, ethanol, a polyol (for example, glycerol, propylene glycol, liquid polyethylene glycols, and the like), vegetable oils, nontoxic glyceryl esters, and suitable mixtures thereof. The proper fluidity can be maintained, for example, by the formation of liposomes, by the maintenance of the required particle size in the case of dispersions or by the use of surfactants. The prevention of the action of microorganisms can be brought about by various antibacterial and antifungal agents, for example, parabens, chlorobutanol, phenol, sorbic acid, thimerosal, and the like. In many cases, it will be preferable to include isotonic agents, for example, sugars, buffers or sodium chloride. Prolonged absorption of the injectable compositions can be brought about by the use in the compositions of agents delaying absorption, for example, aluminum monostearate and gelatin.

[0835] Sterile injectable solutions are prepared by incorporating the amino acid sequences, Nanobodies and polypeptides of the invention in the required amount in the appropriate solvent with various of the other ingredients enumerated above, as required, followed by filter sterilization. In the case of sterile powders for the preparation of sterile injectable solutions, the preferred methods of preparation are vacuum drying and the freeze drying techniques, which yield a powder of the active ingredient plus any additional desired ingredient present in the previously sterile-filtered solutions.

[0836] For topical administration, the amino acid sequences, Nanobodies and polypeptides of the invention may be applied in pure form, i.e., when they are liquids. However, it will generally be desirable to administer them to the skin as compositions or formulations, in combination with a dermatologically acceptable carrier, which may be a solid or a liquid.

[0837] Useful solid carriers include finely divided solids such as talc, clay, microcrystalline cellulose, silica, alumina and the like. Useful liquid carriers include water, hydroxyalkyls or glycols or water-alcohoUglycol blends, in which the amino acid sequences, Nanobodies and polypeptides of the invention can be dissolved or dispersed at effective levels, optionally with the aid of non-toxic surfactants. Adjuvants such as fragrances and additional antimicrobial agents can be added to optimize the properties for a given use. The resultant liquid compositions can be applied from absorbent pads, used to impregnate bandages and other dressings, or sprayed onto the affected area using pump-type or aerosol sprayers.

[0838] Thickeners such as synthetic polymers, fatty acids, fatty acid salts and esters, fatty alcohols, modified celluloses or modified mineral materials can also be employed with liquid carriers to form spreadable pastes, gels, ointments, soaps, and the like, for application directly to the skin of the user.

[0839] Examples of useful dermatological compositions which can be used to deliver the amino acid sequences, Nanobodies and polypeptides of the invention to the skin are known to the art; for example, see Jacquet et al. (U.S. Pat. No. 4,608,392), Geria (U.S. Pat. No. 4,992,478), Smith et al. (U.S. Pat. No. 4,559,157) and Wortzman (U.S. Pat. No. 4,820,508).

[0840] Useful dosages of the amino acid sequences, Nanobodies and polypeptides of the invention can be determined by comparing their in vitro activity, and in vivo activity in animal models. Methods for the extrapolation of effective dosages in mice, and other animals, to humans are known to the art; for example, see U.S. Pat. No. 4,938,949.

[0841] Generally, the concentration of the amino acid sequence, Nanobodies and polypeptides of the invention in a liquid composition, such as a lotion, will be from about 0.1-25 wt-%, preferably from about 0.5-10 wt-%. The concentration in a semi-solid or solid composition such as a gel or a powder will be about 0.1-5 wt-%, preferably about 0.5-2.5 wt-%.

[0842] The amount of the amino acid sequences, Nanobodies and polypeptides of the invention required for use in treatment will vary not only with the particular amino acid sequence, Nanobody or polypeptide selected but also with the route of administration, the nature of the condition being treated and the age and condition of the patient and will be ultimately at the discretion of the attendant physician or clinician. Also the dosage of the amino acid sequences, Nanobodies and polypeptides of the invention varies depending on the target cell, tumor, tissue, graft, or organ.

[0843] The desired dose may conveniently be presented in a single dose or as divided doses administered at appropriate intervals, for example, as two, three, four or more sub-doses per day. The sub-dose itself may be further divided, e.g., into a number of discrete loosely spaced administrations; such as multiple inhalations from an insufflator or by application of a plurality of drops into the eye.

[0844] An administration regimen could include long-term, daily treatment. By “long-term” is meant at least two weeks and preferably, several weeks, months, or years of duration. Necessary modifications in this dosage range may be determined by one of ordinary skill in the art using only routine experimentation given the teachings herein. See Remington's Pharmaceutical Sciences (Martin, E. W., ed. 4), Mack Publishing Co., Easton, Pa. The dosage can also be adjusted by the individual physician in the event of any complication.

[0845] In another aspect, the invention relates to a method for the prevention and/or treatment of at least one IL-6R related disorders, said method comprising administering, to a subject in need thereof, a pharmaceutically active amount of an amino acid sequence of the invention, of a polypeptide of the invention, and/or of a pharmaceutical composition comprising the same.

[0846] In the context of the present invention, the term “prevention and/or treatment” not only comprises preventing and/or treating the disease, but also generally comprises preventing the onset of the disease, slowing or reversing the progress of disease, preventing or slowing the onset of one or more symptoms associated with the disease, reducing and/or alleviating one or more symptoms associated with the disease, reducing the severity and/or the duration of the disease and/or of any symptoms associated therewith and/or preventing a further increase in the severity of the disease and/or of any symptoms associated therewith, preventing, reducing or reversing any physiological damage caused by the disease, and generally any pharmacological action that is beneficial to the patient being treated.

[0847] The subject to be treated may be any warm-blooded animal, but is in particular a mammal, and more in particular a human being. As will be clear to the skilled person, the subject to be treated will in particular be a person suffering from, or at risk of, the diseases and disorders mentioned herein.

[0848] The invention relates to a method for the prevention and/or treatment of at least one disease or disorder that is associated with IL-6R, with its biological or pharmacological activity, and/or with the biological pathways or signalling in which IL-6R is involved, said method comprising administering, to a subject in need thereof, a pharmaceutically active amount of an amino acid sequence of the invention, of a Nanobody of the invention, of a polypeptide of the invention, and/or of a pharmaceutical composition comprising the same. In particular, the invention relates to a method for the prevention and/or treatment of at least one disease or disorder that can be treated by modulating IL-6R, its biological or pharmacological activity, and/or the biological pathways or signalling in which IL-6R is involved, said method comprising administering, to a subject in need thereof, a pharmaceutically active amount of an amino acid sequence of the invention, of a Nanobody of the invention, of a polypeptide of the invention, and/or of a pharmaceutical composition comprising the same. In particular, said pharmaceutically effective amount may be an amount that is sufficient to modulate IL-6R, its biological or pharmacological activity, and/or the biological pathways or signalling in which IL-6R is involved

[0849] The invention also relates to a method for the prevention and/or treatment of at least one disease or disorder that can be prevented and/or treated by administering of an amino acid sequence of the invention or polypeptide of the invention to a patient, said method comprising administering, to a subject in need thereof, a pharmaceutically active amount of an amino acid sequence of the invention, of a polypeptide of the invention, and/or of a pharmaceutical composition comprising the same.

[0850] More in particular, the invention relates to a method for the prevention and/or treatment of at least one disease or disorder chosen from the group consisting of the diseases and disorders listed herein, said method comprising administering, to a subject in need thereof, a pharmaceutically active amount of an amino acid sequence of the invention, of an amino acid sequence of the invention, of a polypeptide of the invention, and/or of a pharmaceutical composition comprising the same.

[0851] In another embodiment, the invention relates to a method for immunotherapy, and in particular for passive immunotherapy, which method comprises administering, to a subject suffering from or at risk of the diseases and disorders mentioned herein, a pharmaceutically active amount of an amino acid sequence of the invention, of an amino acid sequence of the invention, of a polypeptide of the invention, and/or of a pharmaceutical composition comprising the same.

[0852] In the above methods, the amino acid sequences, Nanobodies and/or polypeptides of the invention and/or the compositions comprising the same can be administered in any suitable manner, depending on the specific pharmaceutical formulation or composition to be used. Thus, the amino acid sequences, Nanobodies and/or polypeptides of the invention and/or the compositions comprising the same can for example be administered orally, intraperitoneally (e.g. intravenously, subcutaneously, intramuscularly, or via any other route of administration that circumvents the gastrointestinal tract), intranasally, transdermally, topically, by means of a suppository, by inhalation, again depending on the specific pharmaceutical formulation or composition to be used. The clinician will be able to select a suitable route of administration and a suitable pharmaceutical formulation or composition to be used in such administration, depending on the disease or disorder to be prevented or treated and other factors well known to the clinician.

[0853] The amino acid sequences, Nanobodies and/or polypeptides of the invention and/or the compositions comprising the same are administered according to a regime of treatment that is suitable for preventing and/or treating the disease or disorder to be prevented or treated. The clinician will generally be able to determine a suitable treatment regimen, depending on factors such as the disease or disorder to be prevented or treated, the severity of the disease to be treated and/or the severity of the symptoms thereof, the specific amino acid sequences, Nanobody or polypeptide of the invention to be used, the specific route of administration and farmaceutical formulation or composition to be used, the age, gender, weight, diet, general condition of the patient, and similar factors well known to the clinician.

[0854] Generally, the treatment regimen will comprise the administration of one or more amino acid sequences, Nanobodies and/or polypeptides of the invention, or of one or more compositions comprising the same, in one or more pharmaceutically effective amounts or doses. The specific amount(s) or doses to administered can be determined by the clinician, again based on the factors cited above.

[0855] Generally, for the prevention and/or treatment of the diseases and disorders mentioned herein and depending on the specific disease or disorder to be treated, the potency of the specific amino acid sequence, Nanobody and polypeptide of the invention to be used, the specific route of administration and the specific pharmaceutical formulation or composition used, the amino acid sequences, Nanobodies and polypeptides of the invention will generally be administered in an amount between 1 gram and 0.01 microgram per kg body weight per day, preferably between 0.1 gram and 0.1 microgram per kg body weight per day, such as about 1, 10, 100 or 1000 microgram per kg body weight per day, either continuously (e.g. by infusion), as a single daily dose or as multiple divided doses during the day. The clinician will generally be able to determine a suitable daily dose, depending on the factors mentioned herein. It will also be clear that in specific cases, the clinician may choose to deviate from these amounts, for example on the basis of the factors cited above and his expert judgment. Generally, some guidance on the amounts to be administered can be obtained from the amounts usually administered for comparable conventional antibodies or antibody fragments against the same target administered via essentially the same route, taking into account however differences in affinity/avidity, efficacy, biodistribution, half-life and similar factors well known to the skilled person.

[0856] Usually, in the above method, a single amino acid sequence, Nanobody or polypeptide of the invention will be used. It is however within the scope of the invention to use two or more amino acid sequences, Nanobodies and/or polypeptides of the invention in combination.

[0857] The amino acid sequences, Nanobodies and polypeptides of the invention may also be used in combination with one or more further pharmaceutically active compounds or principles, i.e. as a combined treatment regimen, which may or may not lead to a synergistic effect. Again, the clinician will be able to select such further compounds or principles, as well as a suitable combined treatment regimen, based on the factors cited above and his expert judgement.

[0858] In particular, the amino acid sequences, Nanobodies and polypeptides of the invention may be used in combination with other pharmaceutically active compounds or principles that are or can be used for the prevention and/or treatment of the diseases and disorders cited herein, as a result of which a synergistic effect may or may not be obtained. Examples of such compounds and principles, as well as routes, methods and pharmaceutical formulations or compositions for administering them will be clear to the clinician.

[0859] When two or more substances or principles are to be used as part of a combined treatment regimen, they can be administered via the same route of administration or via different routes of administration, at essentially the same time or at different times (e.g. essentially simultaneously, consecutively, or according to an alternating regime). When the substances or principles are to be administered simultaneously via the same route of administration, they may be administered as different pharmaceutical formulations or compositions or part of a combined pharmaceutical formulation or composition, as will be clear to the skilled person.

[0860] Also, when two or more active substances or principles are to be used as part of a combined treatment regimen, each of the substances or principles may be administered in the same amount and according to the same regimen as used when the compound or principle is used on its own, and such combined use may or may not lead to a synergistic effect. However, when the combined use of the two or more active substances or principles leads to a synergistic effect, it may also be possible to reduce the amount of one, more or all of the substances or principles to be administered, while still achieving the desired therapeutic action. This may for example be useful for avoiding, limiting or reducing any unwanted side-effects that are associated with the use of one or more of the substances or principles when they are used in their usual amounts, while still obtaining the desired pharmaceutical or therapeutic effect.

[0861] The effectiveness of the treatment regimen used according to the invention may be determined and/or followed in any manner known per se for the disease or disorder involved, as will be clear to the clinician. The clinician will also be able, where appropriate and on a case-by-case basis, to change or modify a particular treatment regimen, so as to achieve the desired therapeutic effect, to avoid, limit or reduce unwanted side-effects, and/or to achieve an appropriate balance between achieving the desired therapeutic effect on the one hand and avoiding, limiting or reducing undesired side effects on the other hand.

[0862] Generally, the treatment regimen will be followed until the desired therapeutic effect is achieved and/or for as long as the desired therapeutic effect is to be maintained. Again, this can be determined by the clinician.

[0863] In another aspect, the invention relates to the use of an amino acid sequence, Nanobody or polypeptide of the invention in the preparation of a pharmaceutical composition for prevention and/or treatment of at least one IL-6R related disorders.

[0864] The subject to be treated may be any warm-blooded animal, but is in particular a mammal, and more in particular a human being. As will be clear to the skilled person, the subject to be treated will in particular be a person suffering from, or at risk of, the diseases and disorders mentioned herein.

[0865] The invention also relates to the use of an amino acid sequence, Nanobody or polypeptide of the invention in the preparation of a pharmaceutical composition for the prevention and/or treatment of at least one disease or disorder that can be prevented and/or treated by administering an amino acid sequence, Nanobody or polypeptide of the invention to a patient.

[0866] More in particular, the invention relates to the use of an amino acid sequence, Nanobody or polypeptide of the invention in the preparation of a pharmaceutical composition for the prevention and/or treatment of IL-6R related disorders, and in particular for the prevention and treatment of one or more of the diseases and disorders listed herein.

[0867] Again, in such a pharmaceutical composition, the one or more amino acid sequences, Nanobodies or polypeptides of the invention may also be suitably combined with one or more other active principles, such as those mentioned herein.

[0868] Finally, although the use of the Nanobodies of the invention (as defined herein) and of the polypeptides of the invention is much preferred, it will be clear that on the basis of the description herein, the skilled person will also be able to design and/or generate, in an analogous manner, other (single) domain antibodies against the IL-6 receptor, as well as polypeptides comprising such (single) domain antibodies (in which the terms “domain antibody” and “single domain antibody” have their usual meaning in the art.

[0869] Thus, one further aspect of the invention relates to domain antibodies or single domain antibodies against the IL-6 receptor, and to polypeptides that comprise at least one such (single) domain antibody and/or that essentially consist of such a (single) domain antibody.

[0870] In particular, such a (single) domain antibody against the IL-6 receptor may comprise 3 CDR's, in which said CDR's are as defined above for the Nanobodies of the invention. For example, such (single) domain antibodies may be the single domain antibodies known as “dAb's”, which are for example as described by Ward et al, supra, but which have CDR's that are as defined above for the Nanobodies of the invention. However, as mentioned above, the use of such “dAb's” will usually have several disadvantages compared to the use of the corresponding Nanobodies of the invention. Thus, any (single) domain antibodies against the IL-6 receptor according to this aspect of the invention will preferably have framework regions that provide these (single) domain antibodies against the IL-6 receptor with properties that make them substantially equivalent to the Nanobodies of the invention.

[0871] Thus, in its broadest sense, the invention relates to an amino acid sequence that essentially consists of four framework regions (FR1 to FR4, respectively) and three complementarity determining regions (CDR1 to CDR3, respectively), and that is directed against (as defined herein) the IL-6 receptor. Such an amino acid sequence preferably contains between 80 and 200 amino acid residues, such as between 90 and 150 amino acid residues, such as about 100-130 amino acid residues (although suitable fragments of such an amino acid sequence—i.e. essentially as described herein for the Nanobodies of the invention or equivalent thereto—may also be used), and is preferably such that it forms an immunoglobulin fold or such that, under suitable conditions, it is capable of forming an immunoglobulin fold (i.e. by suitable folding). The amino acid sequence is preferably chosen from Nanobodies, domain antibodies, single domain antibodies or “dAb's”, and is most preferably a Nanobody as defined herein. The CDR's may be any suitable CDR's (for which reference is made to the disclosure herein), but are preferably as defined herein.

[0872] In further aspects, the invention also relates to proteins and polypeptides that comprise at least one such amino acid sequence; to nucleic acids encoding such amino acid sequences, proteins and polypeptides; to methods for preparing such amino acid sequences, proteins and polypeptides; to host cells expressing or capable of expressing such amino acid sequences, proteins or polypeptides; to compositions, and in particular to pharmaceutical compositions, that comprise such amino acid sequences, proteins, polypeptides, nucleic acids and/or host cells; and to uses of such amino acid sequences, proteins, polypeptides, nucleic acids, host cells and/or compositions, in particular for prophylactic, therapeutic or diagnostic purposes, such as the prophylactic, therapeutic or diagnostic purposes mentioned herein. All these aspects will be clear to the skilled person based on the disclosure herein, and may be essentially the same or equivalent to the embodiments described herein for the Nanobodies of the invention.

[0873] Such an amino acid sequence preferably contains between 80 and 200 amino acid residues, such as between 90 and 150 amino acid residues, such as about 100-130 amino acid residues, although suitable fragments of such an amino acid sequence (i.e. essentially as described herein for the Nanobodies of the invention or equivalent thereto) may also be used.

[0874] Furthermore, it will also be clear to the skilled person that it may be possible to “graft” one or more of the CDR's mentioned above for the Nanobodies of the invention onto other “scaffolds”, including but not limited to human scaffolds or non-immunoglobulin scaffolds. Suitable scaffolds and techniques for such CDR grafting will be clear to the skilled person and are well known in the art, see for example U.S. Pat. No. 7,180,370, WO 01/27160, EP 0 605 522, EP 0 460 167, U.S. Pat. No. 7,054,297, Nicaise et al., Protein Science (2004), 13:1882-1891; Ewert et al., Methods, 2004 October; 34(2):184-199; Kettleborough et al., Protein Eng. 1991 October; 4(7): 773-783; O'Brien and Jones, Methods Mol. Biol. 2003:207:81-100; and Skerra, J. Mol. Recognit. 2000:13:167-187, and Saerens et al., J. Mol. Biol. 2005 Sep. 23; 352(3):597-607, and the further references cited therein. For example, techniques known per se for grafting mouse or rat CDR's onto human frameworks and scaffolds can be used in an analogous mariner to provide chimeric proteins comprising one or more of the CDR's of the Nanobodies of the invention and one or more human framework regions or sequences.

[0875] Thus, in another embodiment, the invention comprises a chimeric polypeptide comprising at least one CDR sequence chosen from the group consisting of CDR1 sequences, CDR2 sequences and CDR3 sequences mentioned herein for the Nanobodies of the invention. Preferably, such a chimeric polypeptide comprises at least one CDR sequence chosen from the group consisting of the CDR3 sequences mentioned herein for the Nanobodies of the invention, and optionally also at least one CDR sequence chosen from the group consisting of the CDR1 sequences and CDR2 sequences mentioned herein for the Nanobodies of the invention. For example, such a chimeric polypeptide may comprise one CDR sequence chosen from the group consisting of the CDR3 sequences mentioned herein for the Nanobodies of the invention, one CDR sequence chosen from the group consisting of the CDR1 sequences mentioned herein for the Nanobodies of the invention and one CDR sequence chosen from the group consisting of the CDR1 sequences and CDR2 sequences mentioned herein for the Nanobodies of the invention. The combinations of CDR's that are mentioned herein as being preferred for the Nanobodies of the invention will usually also be preferred for these chimeric polypeptides.

[0876] In said chimeric polypeptides, the CDR's may be linked to further amino acid sequences and/or may be linked to each other via amino acid sequences, in which said amino acid sequences are preferably framework sequences or are amino acid sequences that act as framework sequences, or together form a scaffold for presenting the CDR's. Reference is again made to the prior art mentioned in the last paragraph. According to one preferred embodiment, the amino acid sequences are human framework sequences, for example V_{H}3 framework sequences. However, non-human, synthetic, semi-synthetic or non-immunoglobulin framework sequences may also be used. Preferably, the framework sequences used are such that (1) the chimeric polypeptide is capable of binding the IL-6 receptor, i.e. with an affinity that is at least 1%, preferably at least 5%, more preferably at least 10%, such as at least 25% and up to 50% or 90% or more of the affinity of the corresponding Nanobody of the invention; (2) the chimeric polypeptide is suitable for pharmaceutical use; and (3) the chimeric polypeptide is preferably essentially non-immunogenic under the intended conditions for pharmaceutical use (i.e. indication, mode of administration, dosis and treatment regimen) thereof (which may be essentially analogous to the conditions described herein for the use of the Nanobodies of the invention).

[0877] According to one non-limiting embodiment, the chimeric polypeptide comprises at least two CDR sequences (as mentioned above) linked via at least one framework sequence, in which preferably at least one of the two CDR sequences is a CDR3 sequence, with the other CDR sequence being a CDR1 or CDR2 sequence. According to a preferred, but non-limiting embodiment, the chimeric polypeptide comprises at least two CDR sequences (as mentioned above) linked at least two framework sequences, in which preferably at least one of the three CDR sequences is a CDR3 sequence, with the other two CDR sequences being CDR1 or CDR2 sequences, and preferably being one CDR1 sequence and one CDR2 sequence. According to one specifically preferred, but non-limiting embodiment, the chimeric polypeptides have the structure FR1′-CDR1-FR2′-CDR2-FR3′-CDR3-FR4′, in which CDR1, CDR2 and CDR3 are as defined herein for the CDR's of the Nanobodies of the invention, and FR1′, FR2′, FR3′ and FR4′ are framework sequences. FR1′, FR2′, FR3′ and FR4′ may in particular be Framework 1, Framework 2, Framework 3 and Framework 4 sequences, respectively, of a human antibody (such as V_{H}3 sequences) and/or parts or fragments of such Framework sequences. It is also possible to use parts or fragments of a chimeric polypeptide with the structure FR1′-CDR1-FR2′-CDR2-FR3′-CDR3-FR4. Preferably, such parts or fragments are such that they meet the criteria set out in the preceding paragraph.

[0878] The invention also relates to proteins and polypeptides comprising and/or essentially consisting of such chimeric polypeptides, to nucleic acids encoding such proteins or polypeptides; to methods for preparing such proteins and polypeptides; to host cells expressing or capable of expressing such proteins or polypeptides; to compositions, and in particular to pharmaceutical compositions, that comprise such proteins or polypeptides, nucleic acids or host cells; and to uses of such proteins or polypeptides, such nucleic acids, such host cells and/or such compositions, in particular for prophylactic, therapeutic or diagnostic purposes, such as the prophylactic, therapeutic or diagnostic purposes mentioned herein. For example, such proteins, polypeptides, nucleic acids, methods, host cells, compositions and uses may be analogous to the proteins, polypeptides, nucleic acids, methods, host cells, compositions and use described herein for the Nanobodies of the invention.

[0879] It should also be noted that, when the Nanobodies of the inventions contain one or more other CDR sequences than the preferred CDR sequences mentioned above, these CDR sequences can be obtained in any manner known per se, for example from Nanobodies (preferred), V_{H} domains from conventional antibodies (and in particular from human antibodies), heavy chain antibodies, conventional 4-chain antibodies (such as conventional human 4-chain antibodies) or other immunoglobulin sequences directed against the IL-6 receptor. Such immunoglobulin sequences directed against the IL-6 receptor can be generated in any manner known per se, as will be clear to the skilled person, i.e. by immunization with the IL-6 receptor or by screening a suitable library of immunoglobulin sequences with the IL-6 receptor, or any suitable combination thereof. Optionally, this may be followed by techniques such as random or site-directed mutagenesis and/or other techniques for affinity maturation known per se. Suitable techniques for generating such immunoglobulin sequences will be clear to the skilled person, and for example include the screening techniques reviewed by Hoogenboom, Nature Biotechnology, 23, 9, 1105-1116 (2005). Other techniques for generating immunoglobulins against a specified target include for example the Nanoclone® technology (as for example described in the published US patent application 2006-0211088), so-called SLAM technology (as for example described in the European patent application 0 542 810), the use of transgenic mice expressing human immunoglobulins or the well-known hybridoma techniques (see for example Larrick et al, Biotechnology, Vol. 7, 1989, p. 934). All these techniques can be used to generate immunoglobulins against the IL-6 receptor, and the CDR's of such immunoglobulins can be used in the Nanobodies of the invention, i.e. as outlined above. For example, the sequence of such a CDR can be determined, synthesized and/or isolated, and inserted into the sequence of a Nanobody of the invention (e.g. so as to replace the corresponding native CDR), all using techniques known per se such as those described herein, or Nanobodies of the invention containing such CDR's (or nucleic acids encoding the same) can be synthesized de novo, again using the techniques mentioned herein.

[0880] Further uses of the amino acid sequences, Nanobodies, polypeptides, nucleic acids, genetic constructs and hosts and host cells of the invention will be clear to the skilled person based on the disclosure herein. For example, and without limitation, the amino acid sequences of the invention can be linked to a suitable carrier or solid support so as to provide a medium than can be used in a manner known per se to purify IL-6R from compositions and preparations comprising the same. Derivatives of the amino acid sequences of the invention that comprise a suitable detectable label can also be used as markers to determine (qualitatively or quantitatively) the presence of IL-6R in a composition or preparation or as a marker to selectively detect the presence of IL-6R on the surface of a cell or tissue (for example, in combination with suitable cell sorting techniques).

[0881] The invention will now be further described by means of the following non-limiting examples and figures, in which the Figures show:

[0882] FIG. 1 Analysis of immune response in llamas 81 and 82 by ELISA.

[0883] FIG. 2 FACS analysis of immune response in llamas 081 and 082.

[0884] FIG. 3 Schematic representation of Alphascreen assays used to identify Nanobodies against the IL6 binding site on IL6R.

[0885] FIG. 4 SDS-PAGE of purified monovalent anti IL6R Nanobodies. M=molecular weight markers. The identity of the Nanobodies is shown on top of the gel.

[0886] FIG. 5 Protein sequences of anti-IL6R Nanobodies.

[0887] FIG. 6 Protein sequences of a selected subset of inhibitory anti-IL6R Nanobodies.

[0888] FIG. 7 Binding of monovalent inhibitory anti IL6R Nanobodies to IL6-R on U266 cells. Fluorescence intensity is blotted on the X-axis, the number of events on the Y-axis. Purified anti-IL6-R antibody BR-6 was included.

[0889] FIGS. 8, 9 and 10 Antagonistic activity of 14 monovalent anti IL6R Nanobodies in alphascreen for inhibition of the IL6/IL6-R interaction.

[0890] FIG. 11 Antagonistic activity of 14 monovalent anti IL6R Nanobodies in cell-based assay (XG-1). BR6, BN12 and the Reference-Fab were included as a reference.

[0891] FIG. 12: Competitive binding of monovalent anti IL6R Nanobodies to sIL6-R in human plasma

[0892] FIG. 13 Competitive binding of monovalent anti IL6R Nanobodies to sIL6-R in cynomolgus plasma

[0893] FIG. 14 SDS-PAGE of purified bispecific anti IL6R/anti SA Nanobodies. M=molecular weight markers. The identity of the Nanobodies is shown on top of the gel.

[0894] FIG. 15 Binding of bispecific anti IL6R/anti SA Nanobodies to IL6-R on U266 cells. Fluorescence intensity is blotted on the X-axis, the number of events on the Y-axis. Purified anti-IL6-R antibody BR-6 was included.

[0895] FIGS. 16 and 17 Antagonistic activity of bispecific anti IL6R/anti SA Nanobodies in Alphascreen for inhibition of the IL6/IL6-R interaction.

[0896] FIGS. 18, 19 and 20 Antagonistic activity of bispecific anti IL6R/anti SA Nanobodies in cell-based assay (XG-1). BR6, BN12 and the Reference-Fab were included as a reference.

[0897] FIGS. 21 and 22 Antagonistic activity of bispecific anti IL6R/anti SA Nanobodies in the presence of 1 mg/mL human serum albumin in cell-based assay (XG-1). BR6, BN12 and the Reference-Fab were included as a reference.

[0898] FIG. 23 SDS-PAGE of purified trivalent anti IL6R/anti SA Nanobodies. M=molecular weight markers. The identity of the Nanobodies is shown on top of the gel.

[0899] FIG. 24 Binding of trivalent anti IL6R/anti SA Nanobodies to IL6-R in Biacore.

[0900] FIG. 25 Binding of trivalent anti IL6R/anti SA Nanobodies to IL6-R on U266 cells. Fluorescence intensity is blotted on the X-axis, the number of events on the Y-axis. Purified anti-IL6-R antibody BR-6 was included.

[0901] FIG. 26 Antagonistic activity of trivalent anti IL6R/anti SA Nanobodies in the absence and in the presence of 1 mg/mL human serum albumin in cell-based assay (XG-1).

[0902] FIG. 27 Sequences of different humanized variants of IL6R03, IL6R04 and IL6R13.

[0903] FIGS. 28, 29, 30 and 31 Antagonistic activity of humanized variants of IL6R03, IL6R04 and IL6R13 anti IL6R Nanobodies in Alphascreen for inhibition of the IL6/IL6-R interaction.

[0904] FIGS. 32 and 33 Concentration of humanized variants of IL6R03, IL6R04 and IL6R13 anti IL6R Nanobodies after incubation at different temperatures.

[0905] FIG. 34 Antagonistic activity in cell-based assay (XG-1) of humanized Nanobodies.

[0906] FIG. 35 Flow cytometric analysis of IMAC-purified Nanobodies from selected clones. IMAC-purified Nanobodies IL6R-24, IL6R-44, IL6R-202 and IL6R-203 were added to cyno IL6R-positive CHO cells. Detection was performed using a PE-labeled rabbit polyclonal anti-Nanobody serum (R23). Nanobodies binding to cells was measured by an increase in fluorescence intensity as compared to cells that were incubated with FACS buffer (PBS+10% FBS) followed by PE-labeled R23 antiserum. Fluorescence intensity is blotted on the X-axis, the number of events on the Y-axis.

[0907] FIGS. 36 and 37 Binding inhibition curve for ALEXA⁶⁴⁷-labeled hIL-6 (625 pM final) competed with unlabeled hIL-6, Nanobody IL6R-202 and Nanobody IL6R-203. The average fluorescence and standard deviation is plotted against the concentration of unlabeled competitor. IC₅₀ values were calculated in graph pad Prism.

[0908] FIG. 38 Flow cytometric analysis of purified IL6R04-HSA and HSA-IL6R04 fusion proteins and IL6R04. Purified Nanobody constructs were added to U266 cells. Detection was performed using a PE-labeled rabbit polyclonal anti-Nanobody serum (R23). Nanobody-HSA fusion protein and Nanobody binding to cells was measured by an increase in fluorescence intensity as compared to cells that were incubated with FACS buffer (PBS+10% FBS) followed by PE-labeled R23 antiserum. Fluorescence intensity is blotted on the X-axis, the number of events on the Y-axis. Purified anti-IL6R antibodies BR6 and BN12 were included as positive control.

[0909] FIG. 39 Proliferative response of the TF1 cell line to Nanobody-HSA formats. 1.25×10⁴ cells were seeded in triplicate in the presence of 200 pg/ml IL-6 and the indicated dilutions of Nanobody-HSA formats or control antibodies BR-6 or BN-12. The cells were pulsed with 0.5 μCi of [³H]thymidine for the last 6 h of a 72-h culture period, after which the incorporated radioactivity was determined.

[0910] FIG. 40 PK analysis of Nanobody IL-6R04-HSA in Balb/c mice. The mean half-life of Nanobody IL-6R04-HSA is 1.10 days.

[0911] FIG. 41 Mean observed (±SD) plasma concentration-time profiles after intravenous administration of 2.00 mg/kg of (A, B) IL6R04-HSA, (C,D) IL6R202 and (E,F) IL6R203.

[0912] FIG. 42 The level of CRP in cynomolgus monkey for the evaluation of in vivo efficacy of anti-IL6R Nanobodies

[0913] FIGS. 43, 44 and 45 Analysis of epitope specificity of a panel of Nanobodies in comparison with the Reference-Fab and Reference IgG (see Reference Example 1 and SEQ ID NOs: 629 to 632) using ELISA

[0914] FIG. 46 Evaluation of specificity of a panel of Nanobodies in comparison with the Reference-Fab (see example 29, first paragraph) using Biacore

[0915] FIGS. 47, 48, 49 and 50 Potency of anti IL6R Nanobodies to inhibit the binding of human IL6 to human, rhesus and cynomolgus monkey soluble IL6R present in plasma

### EXAMPLES

### Experimental Part

[0916] Interleukin-6 (IL6) is a pleiotropic cytokine involved in many physiological processes including regulation of inflammation, immune responses and hematopoiesis. IL6 exerts its biological activities through 2 membrane molecules, a ligand binding 80 kDa chain (IL6-R) and a non-ligand-binding signal transducer gp130. Formation of the IL6-IL6-R-gp130 signaling complex occurs sequentially: first IL6 binds to IL6-R via interaction site I (Kd: ˜10 nM). Next step is binding of this complex to gp130 via interaction sites II and III (Kd: 0.8 nM). Interaction sites II and III are composite sites comprising residues of both IL6 and IL6-R. IL6 and IL6-R alone have no detectable affinity for gp130. The exact stoichiometry and composition of the IL6-IL6-R-gp130 complex is still under debate. The crystal structure of IL6-IL6-R-gp130 complex has been solved (Boulanger (2003) Science 300, 2101-2104) and suggests a 2:2:2 stoichiometry. Besides the membrane-bound IL6-R, a soluble form (sIL6-R) can be generated by proteolytic cleavage (TACE/ADAM17) or alternative splicing. The complex of IL6 and sIL6-R can also bind to gp130. Interestingly, this also happens in cells which do not express endogenous IL6-R. Consequently, cells which release the sIL6-R protein render cells which only express gp130 responsive towards the cytokine IL6. This mechanism has been termed trans-signaling.

[0917] Overexpression of IL6 has been implicated in the pathogenesis of several clinical disorders including chronic autoimmune diseases, multiple myeloma, Castleman's disease, post-menopausal osteoporosis and renal cell carcinoma. To date, a number of inhibitors of the IL6 signaling pathway have been developed including CNTO-328 (anti-IL6 MAb, Centocor), Tocilizumab (anti-IL6-R MAb, Chugai/Roche) and C326 (anti-IL6 avimer, Avidia). CNTO-328 and Tocilizumab are currently in clinical trials for MM, RCC, RA, soJIA, CD and SLE. Tocilizumab is available on the Japanese market since 2005 for treatment of Castleman's disease (Actemra).

### Materials

[0918] Human IL6 was obtained from Diaclone as a recombinant protein produced in E. coli.

[0919] Human bio-IL6 was obtained from Diaclone as human IL6 biotinylated by PE (6 biotins/molecule).

[0920] Human soluble IL6-R was obtained from Peprotech as a recombinant protein produced in HEK293 cells and from R&D Systems as a recombinant protein produced in Sf21 cells.

[0921] MAb BR-6 is a neutralizing anti-IL6-R monoclonal antibody obtained from Diaclone.

[0922] MAb BN-12 is a non-neutralizing anti-IL6-R monoclonal antibody obtained from Diaclone.

[0923] MAb M182 is a biotinylated anti-IL6-R monoclonal antibody obtained from BD Biosciences.

[0924] Llama IgG (h&I) antibody HRP (horse radish peroxidase) conjugated is a polyclonal antibody against llama IgG raised in goat obtained from Bethyl Labs.

[0925] The Reference Fab and Reference IgG were generated as described in the Reference Example below.

### Example 1

### Immunizations

[0926] Two llamas (081 and 082) were immunized with human IL6-R (Peprotech) according to the scheme outlined in Table C-1.

TABLE C-1
Immunization protocol

| Day | Llama 081 | Llama 082 | Tissue collection |
|---|---|---|---|
| 0 | 100 μg | 100 μg | 10 ml pre-immune blood |
| 7 | 100 μg | 100 μg | — |
| 14 | 50 μg | 50 μg | — |
| 21 | 50 μg | 50 μg | — |
| 28 | 50 μg | 50 μg | 10 ml immune blood |
| 35 | 50 μg | 50 μg | — |
| 39 | | | 150 ml immune blood PBL1 |
| | | | lymph node bow biopsy |
| 43 | | | 150 ml immune blood |
| | | | PBL2 |
| 52 | 50 μg | 50 μg | |
| 59 | | | 100 ml immune blood NC1 |

[0927] After completion of the protocol the immune response in each animal was analyzed by ELISA. To this end, biotinylated IL6-R (2 μg/ml) was captured in a neutravidin coated microtiter plate. Serial dilutions of serum samples collected at days 0, 28, 39 and 43 were added (starting dilution: 1/500) and bound llama IgG was detected by addition of goat anti-llama IgG HRP labeled. TMB was used as a substrate. Results are shown in FIG. 1.

[0928] Immune responses were also analyzed by FACS: serial dilutions (starting dilution: 1/100) of serum samples collected at days 0, 28 and 39 were incubated with U266B1 cells (human myeloma). Bound llama IgG was detected by goat anti-llama IgG FITC labeled. Results are shown in FIG. 2.

### Example 2

### Library Construction

[0929] RNA extracted from peripheral blood lymphocytes and lymph node obtained from llama 081 and 082 was used as starting material for RT-PCR to amplify Nanobody encoding gene fragments. These fragments were cloned into phagemid vector pAX50. Phage was prepared according to standard methods (see for example the prior art and applications filed by Ablynx N.V. cited herein) and stored after filter sterilization at 4° C. for further use. The characteristics of the constructed libraries are shown in Table C-2.

TABLE C-2
Size and percentages of inserts of constructed libraries

| | Library size | % insert |
|---|---|---|
| Llama 81 | 6 × 10⁷ | 87 |
| Llama 82 | 5 × 10⁷ | 78 |

### Example 3

### Selections

[0930] Selections were carried out with the above libraries using various conditions as summarized in Table C-3.

TABLE C-3
Experimental conditions used in different selection strategies

| | Immobilization/ | | Concentration/ | |
|---|---|---|---|---|
| Method | capture | Antigen | amount | Elution |
| Magnetic | Streptavidin | bio-IL6-R | 0, 1, 10, 100 ng | Trypsin |
| beads | | | | |
| Solution | Streptavidin | bio-IL6-R | 0, 0.01, 0.1, 1 nM | Trypsin |
| | beads | | | |
| Plate | BN-12 | IL6-R | 0, 1, 10, 100 nM | Trypsin |
| | | (Peprotech) | | |
| Plate | BN-12 | IL6-R | 0, 1, 10, 100 nM | Trypsin |
| | | (R&D) | | |

[0931] Only a single round of selection was performed for all conditions. Each selection output was analyzed for enrichment factor (# phage present in eluate relative to control), diversity (HinfI profiling) and percentage of IL6-R positive clones (ELISA). Based on these parameters the best selections were chosen for further analysis. To this end, the output from each selection was recloned as a pool into the expression vector pAX51. Colonies were picked and grown in 96 deep well plates (1 ml volume) and induced by adding IPTG for Nanobody expression. Periplasmic extracts (volume: ˜80 μl) were prepared according to standard methods (see for example the prior art and applications filed by Ablynx N.V. cited herein).

### Example 4

### Screening

[0932] Periplasmic extracts were analyzed first for their ability to inhibit the IL6-IL6-R interaction. To this end, 2 independent Alphascreen assays were set up which are depicted schematically in FIG. 3. In assay 1, the periplasmic extracts were incubated with biotinylated IL6 (3 nM), soluble IL6 receptor (1 nM), streptavidin coated donor beads and MAb BN-12 coated acceptor beads (20 μg/ml). Nanobodies positive in this assay could either inhibit the IL6-IL6-R interaction or IL6-R-MAb BN-12 interaction. To discriminate between these 2 possibilities a second assay was set up (Assay 2). In this assay the periplasmic extract were incubated with bio-IL6-R (0.3 nM), streptavidin coated donor beads and MAb BN-12 coated acceptor beads (10 μg/ml). Nanobodies positive in assay 1 but negative in assay 2 were considered as IL6-IL6-R inhibitors. Periplasmic extracts were diluted 25-fold in both assays which corresponds roughly to a final concentration of 40 nM.

[0933] This resulted in two different subclasses of anti-IL6-R Nanobodies; i.e.

[0934] a) Nanobodies against IL6-R that were capable of modulating (e.g. partially or fully reducing or preventing) binding of IL6 to IL6-R. In the present example, these were obtained in selections where IL6-R was immobilized on MAb BN-12 (although other methods of obtaining such Nanobodies will be clear to the skilled person).

[0935] b) Nanobodies against IL6-R that were capable of modulating (e.g. partially or fully reducing or preventing) binding of IL6-R to MAb BN-12. In the present example, these were obtained in alternative selection strategies where IL6-R was not immobilized on MAb BN-12 (although other methods of obtaining such Nanobodies will be clear to the skilled person).

[0936] A statistical overview of the screening effort is shown in Table C-4. Nanobodies showing the strongest inhibition were selected for further characterization.

TABLE C-4
Screening for Nanobodies that inhibit the IL6/IL6-R interaction

| | # clones | | # clones | # unique |
|---|---|---|---|---|
| Assay | screened | # inhibitors (%) | sequenced | sequences |
| IL6-IL6-R | 1536 | 72 (4.7%) | 46 | 14 |

### Example 5

### Nanobody Expression and Purification

[0937] Selected Nanobodies were expressed in E. coli as c-myc, His6-tagged proteins in a culture volume of 50 mL. Expression was induced by addition of 1 mM IPTG and allowed to continue for 4 h at 37° C. After spinning the cell cultures, periplasmic extracts were prepared by freeze-thawing the pellets. These extracts were used as starting material for immobilized metal affinity chromatography (IMAC). Nanobodies were eluted from the column with 150 mM imidazole and subsequently dialyzed against PBS. Total yield and yield per liter of cell culture are listed in Table C-5.

[0938] SDS-PAGE of purified Nanobodies is shown in FIG. 4.

TABLE C-5
Expression yields of anti-IL6-R Nanobodies in E. coli

| Nanobody ID | yield (mg) | yield (mg/l) | Nanobody ID | yield (mg) | yield (mg/l) |
|---|---|---|---|---|---|
| PMP40H5 | 0.14 | 0.6 | PMP34G9 | 0.09 | 1.8 |
| PMP35E11 | 0.65 | 2.6 | PMP31A4 | 1.06 | 4.2 |
| PMP32C9 | 0.33 | 6.5 | PMP32E2 | 1.57 | 6.3 |
| PMP35H4 | 0.49 | 9.8 | PMP33A3 | 0.33 | 1.3 |
| PMP32E10 | 0.78 | 3.1 | PMP34A12 | 0.57 | 2.3 |
| PMP30C11 | 0.63 | 2.5 | PMP28E11 | 0.08 | 1.6 |
| PMP35C10 | 0.53 | 2.1 | PMP35F4 | 0.24 | 1.0 |

### Example 6

### Characterization of Monovalent Nanobodies

[0939] For simplicity, monovalent clones were renamed. An overview is given in Table C-6 below.

TABLE C-6
Overview of nomenclature of monovalent anti-IL6R Nanobodies

| ID | Original name |
|---|---|
| IL6R01 | PMP28E11 |
| IL6R02 | PMP30C11 |
| IL6R03 | PMP31A4 |
| IL6R04 | PMP32C9 |
| IL6R05 | PMP32E10 |
| IL6R06 | PMP32E2 |
| IL6R07 | PMP33A3 |
| IL6R08 | PMP34A12 |
| IL6R09 | PMP34G9 |
| IL6R10 | PMP35C10 |
| IL6R11 | PMP35E11 |
| IL6R12 | PMP35F4 |
| IL6R13 | PMP35H4 |
| IL6R14 | PMP40H5 |

### a) Binding to IL6-R in Biacore

[0940] Nanobodies showing the strongest inhibition were selected for off-rate analysis on Biacore and DNA sequencing (FIG. 5 and Table C-7).

[0941] A subset of 14 inhibitory Nanobodies and 3 control Nanobodies (which do not inhibit the interaction between IL6 and IL6-R) were selected for further analysis in cell based assays. FIG. 6 shows the protein sequences of this selected subset of Nanobodies.

[0942] Affinity constants (Kd) of these 14 individual inhibitory Nanobodies were determined by surface plasmon resonance on a Biacore 3000 instrument. In brief, IL6-R is amine-coupled to a CM5 sensor chip at a density of 800-1000 RU. Remaining reactive groups are inactivated. Nanobody binding is assessed at various concentrations ranging from 0.5 to 50 nM. Each sample is injected for 4 min at a flow rate of 45 μl/min to allow for binding to chip-bound antigen. Next, binding buffer without Nanobody is sent over the chip at the same flow rate to allow for dissociation of bound Nanobody. After 10 min, remaining bound analyte is removed by injecting regeneration solution (Glycine/HCl pH1.5). Binding curves obtained at different concentrations of Nanobody are used to calculate Kd values. In Table C-8, an overview of kₐ/k_{off}, kₐ, and k_{d} values for the selected subset of 14 Nanobodies is shown.

TABLE C-7
Off rates (obtained from Biacore-analysis) of anti-IL6-R Nanobodies

| Clone ID | k_{off} (s⁻¹) | clone ID | k_{off} (s⁻¹) |
|---|---|---|---|
| PMP 35 A3 | 1.18E−03 | PMP 33 B11 | 1.42E−03 |
| PMP 35 C6 | 9.32E−04 | PMP 33 D1 | 9.34E−04 |
| PMP 35 D10 | 3.26E−04 | PMP 33 H10 | 6.69E−04 |
| PMP 35 G9 | 1.86E−03 | PMP 33 H7 | 1.49E−03 |
| PMP 40 F12 | 4.39E−04 | PMP 35 C10 | 5.09E−04 |
| PMP 31 C5 | 1.11E−04 | PMP 35 E2 | 7.54E−04 |
| PMP 31 D2 | 2.81E−04 | PMP 35 E11 | 4.17E−04 |
| PMP 32 C9 | 1.50E−04 | PMP 35 G11 | 2.05E−04 |
| PMP 32 F10 | 5.80E−04 | PMP 30 A10 | 2.68E−03 |
| PMP 28 A2 | 1.24E−03 | PMP 33 C10 | 3.08E−03 |
| PMP 28 C7 | 1.31E−03 | PMP 35 H4 | 1.78E−04 |
| PMP 28 D4 | 1.85E−03 | PMP 30 D4 | 3.24E−04 |
| PMP 28 F7 | 1.26E−03 | PMP 30 H1 | 2.83E−04 |
| PMP 28 H6 | 2.47E−03 | PMP 33 A2 | 5.00E−04 |
| PMP 31 B11 | 1.24E−03 | PMP 34 F8 | 1.42E−04 |
| PMP 31 B4 | 1.28E−03 | PMP 35 B4 | 3.03E−04 |
| PMP 31 C8 | 1.25E−03 | PMP 40 C9 | 1/3.6E−04 |
| PMP 31 F4 | 1.23E−03 | PMP 40 H5 | 1.14E−04 |
| PMP 32 E10 | 1.27E−03 | PMP 30 B9 | 1.56E−04 |
| PMP 32 H5 | 1.28E−03 | PMP 30 F1 | 1.01E−03 |
| PMP 32 D12 | 2.70E−03 | PMP 34 B4 | 9.53E−04 |
| PMP 30 A2 | 2.57E−03 | PMP 34 F10 | 1.63E−03 |
| PMP 30 B6 | 8.42E−04 | PMP 40 A2 | 5.69E−04 |
| PMP 30 G11 | 1.64E−03 | PMP 28 G3 | 1.93E−03 |
| PMP 34 A12 | To be determined | PMP 30 C11 | 2.94E−03 |
| PMP 34 C3 | 4.35E−04 | PMP 31 A4 | 1.60E−03 |
| PMP 35 H7 | 1.48E−03 | PMP 34 C11 | 3.67E−03 |
| PMP 33 G3 | 1.19E−03 | PMP 34 E10 | 2.00E−03 |
| PMP 34 A5 | 1.68E−03 | PMP 34 G9 | 1.39E−03 |
| PMP 34 D2 | 3.31E−04 | PMP 35 F4 | 8.96E−04 |
| PMP 34 E9 | 5.03E−04 | PMP 28 B1 | 1.34E−03 |
| PMP 34 G3 | 1.40E−04 | PMP 28 E11 | To be determined |
| PMP 30 B1 | 1.00E−03 | PMP 32 E2 | 8.86E−04 |
| PMP 28 G1 | 3.17E−03 | PMP 33 A3 | 2.42E−04 |
| PMP 30 B3 | 2.96E−04 | PMP 28 B2 | 5.39E−03 |
| PMP 30 B7 | 6.66E−04 | PMP 28 D1 | 1.45E−02 |

TABLE C-8
Overview of k_{d}/k_{off}-, kₐ-, and K_{d}-values for a selected subset of
14 inhibitory anti-IL6-R Nanobodies.

| Nanobody ID | k_{d}/k_{off} (s⁻¹) | kₐ (1/Ms) | K_{d} (nM) |
|---|---|---|---|
| IL6R01 | 1.10E−04 | 2.62E+05 | 0.418 |
| IL6R02 | 2.94E−03 | 8.40E+05 | 5.90 |
| | 4.95E−03 | | |
| IL6R03 | 1.47E−03 | 4.84E+05 | 3.03 |
| | 1.60E−03 | | |
| IL6R04 | 9.42E−05 | 3.65E+05 | 0.26 |
| | 1.50E−04 | | |
| IL6R05 | 1.41E−03 | 1.44E+05 | 9.79 |
| | 1.27E−03 | | |
| IL6R06 | 8.86E−04 | 1.07E+06 | 7.10 |
| | 7.57E−03 | | |
| IL6R07 | 2.42E−04 | | |
| IL6R08 | 1.97E−03 | 1.94E+05 | 10.2 |
| IL6R09 | 1.29E−03 | 6.41E+05 | 2.01 |
| | 1.30E−03 | 1.11E+06 | 1.17 |
| | 1.39E−03 | | |
| IL6R10 | 5.26E−04 | 4.14E+05 | 1.27 |
| | 5.09E−04 | | |
| IL6R11 | 3.40E−04 | 3.91E+05 | 0.87 |
| | 3.96E−04 | 2.15E+05 | 1.85 |
| | 4.17E−04 | | |
| IL6R12 | 1.16E−03 | 6.78E+05 | 1.71 |
| | 8.96E−04 | | |
| IL6R13 | 1.21E−04 | 2.31E+05 | 0.53 |
| | 1.09E−04 | 1.37E+05 | 0.79 |
| | 1.78E−04 | | |
| IL6R14 | 1.00E−04 | 4.02E+05 | 0.25 |
| | 1.14E−04 | | |
| Reference Fab | 6.60E−04 | 7.68E+05 | 0.86 |

### b) Binding to IL6-R on U266 Cells

[0943] Binding to membrane-bound IL6R expressed on U266 cells was analyzed in FACS. Flow cytometric analysis was performed of IMAC-purified Nanobodies from selected clones (IL6R04, IL6R09, IL6R11, IL6R13, IL6R14). IMAC-purified Nanobodies were added to IL6-R positive U266 cells. Detection was performed by a monoclonal anti-myc antibody followed by a PE-labeled polyclonal anti-mouse antibody (Jackson ImmunoResearch Laboratories 115-115-164 Lot 69854). Nanobodies binding to cells was measured by an increase in fluorescence intensity as compared to cells that were incubated with FACS buffer (PBS+10% FBS) followed by monoclonal anti-myc antibody and/or PE-labeled polyclonal anti-mouse antibody. Results are shown in FIG. 7. Fluorescence intensity is blotted on the X-axis, the number of events on the Y-axis. Purified anti-IL6-R antibody BR-6 was included.

### c) Epitope Mapping

[0944] Nanobodies were analyzed for competition with Tocilizumab-Fab.

[0945] The 14 purified Nanobodies were tested in Alphascreen for inhibition of the Reference-Fab/IL6R interaction. A fixed concentration of purified proteins (100 nM) was added to biotinylated IL6-R (1 nM) and incubated for 15 min. Subsequently Reference-Fab-coated acceptor beads were added and this mixture was incubated for 1 hour. Finally streptavidin donor beads were added and after 1 hour incubator the plate was read on the Envision microplate reader. BR-6, BN12 and the Reference-Fab were included as reference. Results, shown in Table C-9, are expressed as the % binding retained in competition with Reference-Fab. The lower the number, the higher the competition, the higher the overlap in epitope.

TABLE C-9
Inhibition of the Reference-Fab/IL6R interaction by 14 selected
inhibitory anti-IL6-R Nanobodies.

| | % binding retained in |
|---|---|
| Nanobody ID | competition with Reference-Fab |
| IL6R01 | 49 |
| IL6R02 | 86 |
| IL6R03 | 5 |
| IL6R04 | 50 |
| IL6R05 | 64 |
| IL6R06 | 36 |
| IL6R07 | 80 |
| IL6R08 | 99 |
| IL6R09 | 62 |
| IL6R10 | 102 |
| IL6R11 | 40 |
| IL6R12 | 103 |
| IL6R13 | 25 |
| IL6R14 | 96 |

### d) Competition Assays/Antagonistic Activity in Alphascreen

[0946] The 14 purified Nanobodies were tested in Alphascreen for inhibition of the IL6/IL6-R interaction. Serial dilutions of purified proteins (concentration range: 500 nM-10 pM) were added to IL6-R (0.3 nM) and incubated for 15 min. Subsequently 3 nM bio-IL6 and BN12-coated acceptor beads were added and this mixture was incubated for 1 hour. Finally streptavidin donor beads were added and after 1 hour incubator the plate was read on the Envision microplate reader. BR-6 and the Reference-Fab were included as reference. Results are shown in FIGS. 8, 9 and 10. Dose-response curves were observed for all 14 Nanobodies with IC₅₀-values ranging from 48 pM to 1.7 nM. As can be seen from FIGS. 8, 9 and 10, the invention provides Nanobodies that, under the conditions of this assay, exhibit essentially full (i.e. >90%; preferably >95%) inhibition of the IL6-IL6-R interaction; or alternatively Nanobodies that, under the conditions of the assay, provide partial inhibition (i.e. between 25% and 90%; preferably between 40% and 75%) of the IL6-IL6-R interaction (e.g. IL6-R07).

### e) Antagonistic Activity in Cell-Based Assay (XG-1)

[0947] All purified Nanobodies were tested in the XG1 assay. XG1 is an IL6-dependent human myeloma cell line. Half-maximal proliferation is achieved at ˜20 pg/ml of IL6. Assays were essentially performed as described by Zhang et al. (Blood 83: 3654-3663). BR6, BN12 and the Reference-Fab were included as a reference. Results are outlined in FIG. 11. IC50 values ranged from 50 nM to 90 pM and are presented in Table C-10.

TABLE C-10
IC50 values of 14 selected inhibitory anti-IL6-R Nanobodies
measured in XG-1 cell based assay

| ID | IC50 (nM) |
|---|---|
| IL6R02 | 31.04 |
| IL6R03 | 16.16 |
| IL6R04 | 0.089 |
| IL6R05 | 7.295 |
| IL6R06 | 42.05 |
| IL6R07 | 50.47 |
| IL6R08 | 36.6 |
| IL6R09 | 2.745 |
| IL6R10 | 2.546 |
| IL6R11 | 5.366 |
| IL6R12 | 2.753 |
| IL6R13 | 1.395 |
| IL6R14 | 0.603 |
| Reference-Fab | 5.985 |
| BN12 | 0.2721 |
| BR6 | 0.064 |

### f) Potency of Monovalent Wild Type Nanobodies in Cell-Based Assay (TF-1)

[0948] The TF-1 cell (ECACC) line was maintained between 2-9×100,000 cells/mL using RPMI 1640 supplemented with 2 mM Glutamine, 1% Sodium pyruvate, 3 ng/mL Human GM-CSF (eBiosciences) and 10% Foetal Bovine serum (Gibco). Cells were subcultured 3 times a week and were maintained at 37% and a 5% CO₂ atmosphere. The same batch of GM-CSF (Lot E019991) and of Foetal Bovine Serum (lot no 41Q4556K) was used.

[0949] The cell-based assay was performed similarly as described in de Hon, F. D., Ehlers, M., Rose-John, S., Ebeling, S. B., Bos, H. K., Aarden, L. A., and Brakenhoff, J. P. (1994) J Exp Med 180, 2395-2400. Cell suspensions were centrifuged for 5 min at 200 g and the supernatant was removed. Cells were resuspended in RPMI 1640 supplemented with 2 mM Glutamine, 1% Sodium pyruvate and 10% Foetal Bovine serum, were seeded at a density of 12500 cells/well in a 96-well plate and incubated for 72 h with different dilutions of Nanobodies® and a constant amount of 500 pg/mL IL-6. The 96-well plates were incubated in a humid chamber. Every sample was analysed in triplicate. The total volume/well was 200 μL. During the last 6 h of the incubation, cells were pulse-labeled with 0.2 μCi/well of ³H-thymidine (GE Healthcare) in a total volume of 20 μL. Cells were harvested with a semiautomatic cell harvester (Filtermate harvester, PerkinElmer) and the ³H-thymidine incorporation was measured using a Topcount NXT counter (PerkinElmer). Results are expressed as average counts per minute (cpm) per well. IC 50 values are summarised in Table C-11.

TABLE C-11
IC50 values obtained in TF-1 assay of monovalent wild type
Nanobodies
IC50 (nM)
TF-1

| | |
|---|---|
| IL6R04 | 0.545 |
| IL6R14 | 1.751 |
| IL6R11 | 6.623 |
| IL6R12 | 6.915 |
| IL6R13 | 7.197 |
| IL6R10 | 9.147 |
| IL6R09 | 10.01 |
| IL6R05 | 19.94 |
| IL6R03 | 28.05 |
| IL6R02 | 29.66 |
| IL6R07 | 35 |
| IL6R08 | 42.88 |
| IL6R06 | 77.23 |

g) Binding to sIL6-R in Human Plasma

[0950] Soluble human IL6-R is present in plasma in the range of 80 ng/ml-400 ng/ml (Jones et al., 2001, FASEB Journal 15:43-58). To analyze whether Nanobodies bind to naturally occurring sIL6R, binding of monovalent nanobodies to U266 cells was performed in presence of human plasma. Competitive binding could be demonstrated indicating that soluble IL6-R is bound by the Nanobodies analyzed. Inhibition of binding of monovalent IMAC-purified Nanobodies from selected clones (IL6R03, IL6R04, IL6R13) to U266 cells in the presence of human plasma was measured. IMAC-purified Nanobodies were added to IL6-R positive U266 cells in the presence of human plasma. Detection was performed by a monoclonal anti-myc antibody followed by a PE-labeled polyclonal anti-mouse antibody. Inhibition of binding of Nanobodies to cells in the presence of human plasma was measured by a decrease in fluorescence intensity as compared to the fluorescence intensity of Nanobodies binding to cells in the absence of human plasma. Results are shown in FIG. 12. Fluorescence intensity is blotted on the X-axis, the number of events on the Y-axis. Purified anti-IL6-R antibody BR-6 was included. U266 cells incubated with monoclonal anti-myc antibody followed by a PE-labeled polyclonal anti-mouse antibody in the presence/absence of human plasma served as background staining control.

h) Binding to sIL6-R in Cynomolgus Plasma

[0951] Soluble human IL6-R is present in plasma in the range of 80 ng/ml-400 ng/ml (Jones et al., 2001, FASEB Journal 15:43-58). To analyze whether Nanobodies bind to naturally occurring sIL6R, binding of monovalent nanobodies to U266 cells was performed in presence of cynomolgus plasma. Competitive binding could be demonstrated indicating that soluble IL6-R is bound by the Nanobodies analyzed. Inhibition of binding of monovalent IMAC-purified Nanobodies from selected clones (IL6R04, IL6R13) to U266 cells in the presence of cynomolgus plasma. IMAC-purified Nanobodies were added to IL6-R positive U266 cells in the presence of cynomolgus plasma was measured. Detection was performed by a monoclonal anti-myc antibody followed by a PE-labeled polyclonal anti-mouse antibody. Inhibition of binding of Nanobodies to cells in the presence of cynomolgus plasma was measured by a decrease in fluorescence intensity as compared to the fluorescence intensity of Nanobodies binding to cells in the absence of cynomolgus plasma. Results are shown in FIG. 13. Fluorescence intensity is blotted on the X-axis, the number of events on the Y-axis. Purified anti-IL6-R antibody BR-6 was included. U266 cells incubated with monoclonal anti-myc antibody followed by a PE-labeled polyclonal anti-mouse antibody in the presence/absence of cynomolgus plasma served as background staining control.

### i) Cross-Reactivity to Mouse IL6-R

[0952] Binding to mouse IL6-R(R&D Systems, cat#1830-SR/CF) was analyzed in ELISA. A maxisorp 96-well plate was coated with mouse IL6-R (1 μg/ml), blocked and incubated with a dilution series of Nanobodies (500 nM-0.16 nM). Bound Nanobodies were detected using anti-Myc and anti-mouse horse radish peroxidase using TMB substrate. No binding could be observed.

### Example 7

### Construction and Expression of Bi-Specific Anti-IL6-R Nanobodies

[0953] All 14 selected Nanobodies were also expressed as bispecifics consisting of a C-terminal anti-HSA Nanobody (ALB-1), a 9 amino acid Gly/Ser linker and an N-terminal anti-IL6-R Nanobody. These constructs were expressed in E. coli as c-myc, His6-tagged proteins and subsequently purified from the culture medium by immobilized metal affinity chromatography (IMAC) and size exclusion chromatography (SEC). Total yield and yield per liter of cell culture are listed in Table C-12. SDS-PAGE of purified Nanobodies is shown in FIG. 14.

TABLE C-12
Expression yields of bi-specific anti-IL6-R Nanobodies in E. coli

| Nanobody ID | yield (mg) | yield (mg/L) |
|---|---|---|
| PMP28E11-9GS-ALB-1 | tbd | |
| PMP30C11-9GS-ALB-1 | 1.06 | 4.22 |
| PMP31A4-9GS-ALB-1 | tbd | |
| PMP32C9-9GS-ALB-1 | 0.50 | 1.98 |
| PMP32E2-9GS-ALB-1 | 1.05 | 4.19 |
| PMP32E10-9GS-ALB-1 | 1.25 | 5.00 |
| PMP33A3-9GS-ALB-1 | tbd | |
| PMP34A12-9GS-ALB-1 | 2.11 | 8.44 |
| PMP34G9-9GS-ALB-1 | 3.30 | 13.2 |
| PMP35C10-9GS-ALB-1 | 0.93 | 3.74 |
| PMP35E11-9GS-ALB-1 | 1.82 | 7.28 |
| PMP35F4-9GS-ALB-1 | tbd | |
| PMP35H4-9GS-ALB-1 | 1.88 | 7.52 |
| PMP40H5-9GS-ALB-1 | tbd | |

### Example 8

### Characterization of Bi-Specific Anti-IL6-R Nanobodies

[0954] For simplicity, bispecific clones were renamed. An overview is given in Table C-13 below.

TABLE C-13
Overview of nomenclature of bispecific anti-IL6R Nanobodies

| ID | Formatted Nanobody |
|---|---|
| IL6R21 | Bispecific PMP28E11-9AA GlySer-ALB-1 |
| IL6R22 | Bispecific PMP30C11-9AA GlySer-ALB-1 |
| IL6R23 | Bispecific PMP31A4-9AA GlySer-ALB-1 |
| IL6R24 | Bispecific PMP32C9-9AA GlySer-ALB-1 |
| IL6R25 | Bispecific PMP32E10-9AA GlySer-ALB-1 |
| IL6R26 | Bispecific PMP32E2-9AA GlySer-ALB-1 |
| IL6R27 | Bispecific PMP33A3-9AA GlySer-ALB-1 |
| IL6R28 | Bispecific PMP34A12-9AA GlySer-ALB-1 |
| IL6R29 | Bispecific PMP34G9-9AA GlySer-ALB-1 |
| IL6R30 | Bispecific PMP35C10-9AA GlySer-ALB-1 |
| IL6R31 | Bispecific PMP35E11-9AA GlySer-ALB-1 |
| IL6R32 | Bispecific PMP35F4-9AA GlySer-ALB-1 |
| IL6R33 | Bispecific PMP35H4-9AA GlySer-ALB-1 |
| IL6R34 | Bispecific PMP40H5-9AA GlySer-ALB-1 |

### a) Binding to IL6-R in Biacore

[0955] Affinity constants (Kd) of the 14 bispecific (anti-IL6R/anti-HSA) Nanobodies (table C-14) were determined by surface plasmon resonance on a Biacore 3000 instrument. In brief, IL6-R is amine-coupled to a CM5 sensor chip at a density of 800-1000 RU. Remaining reactive groups are inactivated. Nanobody binding is assessed at various concentrations ranging from 0.5 to 50 nM. Each sample is injected for 4 min at a flow rate of 45 μl/min to allow for binding to chip-bound antigen. Next, binding buffer without Nanobody is sent over the chip at the same flow rate to allow for dissociation of bound Nanobody. After 10 min, remaining bound analyte is removed by injecting regeneration solution (Glycine/HCl pH1.5). Binding curves obtained at different concentrations of Nanobody are used to calculate Kd values. In Table C-14 an overview of k_{d}/k_{off}, kₐ, and K_{d} values for the 14 bispecific Nanobodies is shown.

TABLE C-14
Overview of k_{d}/k_{off}-, kₐ-, and K_{d}-values for binding
of 14 bispecific (anti-IL6-R/anti-HSA) Nanobodies to IL6-R

| Nanobody ID | k_{d}/k_{off} (s⁻¹) | kₐ (1/Ms) | K_{d} (nM) |
|---|---|---|---|
| IL6R22 | 5.65E−03 | 3.33E+05 | 16.9 |
| IL6R23 | 1.46E−03 | 3.19E+05 | 4.59 |
| IL6R24 | 1.10E−04 | 3.68E+05 | 0.3 |
| IL6R25 | 1.21E−03 | 1.18E+05 | 10.3 |
| IL6R26 | 6.90E−03 | 4.46E+05 | 15.5 |
| IL6R28 | 5.26E−04 | 2.41E+05 | 2.18 |
| IL6R29 | 1.49E−03 | 7.13E+05 | 2.1 |
| IL6R30 | 1.20E−03 | 1.60E+05 | 7.52 |
| IL6R31 | 3.77E−04 | 1.62E+05 | 2.32 |
| IL6R32 | 1.26E−03 | 1.01E+06 | 1.3 |
| IL6R33 | 1.25E−04 | 1.13E+05 | 1.11 |
| IL6R34 | 1.08E−04 | 2.58E+05 | 0.417 |

### b) Binding to Human and Mouse Serum Albumin in Biacore

[0956] Binding of Nanobodies® to serum albumin was characterized by surface plasmon resonance in a Biacore 3000 instrument, and an equilibrium constant, K_{D}, was determined. In brief, serum albumin from different species was covalently bound to CM5 sensor chips surface via amine coupling until an increase of 500 response units was reached. Remaining reactive groups were inactivated. Nanobody® binding was assessed using a series of different concentrations. Each Nanobody® at each concentration was injected for 4 minutes at a flow rate of 45 μl/min to allow for binding to chip-bound antigen. Next, binding buffer without Nanobody® was sent over the chip at the same flow rate to allow dissociation of bound Nanobody®. After 15 mM, remaining bound analyte was removed by injecting regeneration solution (50 mM NaOH).

[0957] From the sensorgrams obtained for the different concentrations of each analyte, K_{D} values were calculated via kinetic data analysis. Results are presented in Table C-15 below.

### c) Binding to IL6-R on U266 Cells

[0958] Flow cytometric analysis of bispecific IMAC-purified Nanobodies from selected clones (IL6R23, IL6R24, IL6R29, IL6R33) was done. IMAC-purified Nanobodies were added to IL6-R positive U266 cells. Detection was performed by a monoclonal anti-myc antibody followed by a PE-labeled polyclonal anti-mouse antibody. Nanobodies binding to cells was measured by an increase in fluorescence intensity as compared to cells that were incubated with FACS buffer (PBS+10% FBS) followed by monoclonal anti-myc antibody and/or PE-labeled polyclonal anti-mouse antibody. Results are shown in FIG. 15. Fluorescence intensity is blotted on the X-axis, the number of events on the Y-axis. Purified anti-IL6-R antibody BR-6 was included.

TABLE C-15
Overview of k_{d}/k_{off}-, kₐ-, and K_{d}-values for binding of 14 bispecific (anti-IL6-R/anti-HSA)
Nanobodies ® to human, mouse, cyno, rhesus and baboon serum albumin

| | Human SA | | | Mouse SA | | | Cyno SA | | |
|---|---|---|---|---|---|---|---|---|---|
| Nanobody ID | k_{d}/k_{off} (s⁻¹) | kₐ (1/Ms) | K_{d} (nM) | k_{d}/K_{off} (s⁻¹) | kₐ (1/Ms) | K_{d} (nM) | k_{d}/k_{off} (s⁻¹) | kₐ (1/Ms) | K_{d} (nM) |
| IL6R22 | 3.27E−03 | 2.94E+05 | 11.1 | 5.08E−02 | 4.72E+05 | 108 | | | |
| IL6R23 | 7.05E−03 | 4.58E+05 | 15.4 | 5.50E−02 | 2.00E+05 | 275 | 2.77E−03 | 1.00E+05 | 27.6 |
| | 3.08E−03 | 1.92E+05 | 16 | | | | | | |
| IL6R24 | 3.31E−03 | 2.21E+05 | 15 | 4.95E−02 | 4.06E+05 | 122 | 3.34E−03 | 1.18E+05 | 28.3 |
| IL6R25 | 3.17E−03 | 2.29E+05 | 13.9 | 4.74E−02 | 3.89E+05 | 122 | | | |
| IL6R26 | 3.13E−03 | 3.33E+05 | 9.39 | 4.38E−02 | 6.01E+05 | 73 | | | |
| IL6R28 | 3.78E−03 | 3.56E+05 | 10.6 | 4.78E−02 | 2.65E+05 | 180 | | | |
| IL6R29 | 3.13E−03 | 2.91E+05 | 10.8 | 4.58E−02 | 5.52E+05 | 83 | 3.07E−03 | 1.62E+05 | 19 |
| IL6R30 | 3.27E−03 | 2.71E+05 | 12.1 | 5.10E−02 | 4.53E+05 | 113 | | | |
| IL6R31 | 3.04E−03 | 2.27E+05 | 13.4 | 4.23E−02 | 4.88E+05 | 86.8 | | | |
| IL6R32 | 3.20E−03 | 3.15E+05 | 10 | 5.00E−02 | 2.78E+05 | 179 | | | |
| IL6R33 | 3.69E−03 | 1.35E+05 | 27.3 | 5.01E−02 | 5.08E+05 | 98.6 | 4.04E−03 | 1.65E+05 | 24.5 |
| IL6R34 | 4.72E−03 | 5.15E+05 | 9.18 | 4.40E−02 | 3.97E+05 | 111 | 3.04E−03 | 2.03E+05 | 15 |
| ALB-1 | 7.16E−04 | 1.24E+06 | 0.58 | 7.25E−03 | 1.11E+06 | 6.5 | | | |

| | Rhesus SA | | | Baboon SA | | |
|---|---|---|---|---|---|---|
| Nanobody ID | k_{d}/K_{off} (s⁻¹) | kₐ (1/Ms) | K_{d} (nM) | k_{d}/k_{off} (s⁻¹) | kₐ (1/Ms) | K_{d} (nM) |
| IL6R22 | | | | | | |
| IL6R23 | 2.67E−03 | 1.12E+05 | 23.8 | 7.47E−03 | 3.22E+05 | 23.2 |
| IL6R24 | 3.53E−03 | 1.25E+05 | 28.3 | 4.98E−03 | 1.24E+05 | 40.3 |
| IL6R25 | | | | | | |
| IL6R26 | | | | | | |
| IL6R28 | | | | | | |
| IL6R29 | 3.29E−03 | 1.60E+05 | 20.6 | 4.53E−03 | 1.69E+05 | 26.8 |
| IL6R30 | | | | | | |
| IL6R31 | | | | | | |
| IL6R32 | | | | | | |
| IL6R33 | 3.83E−03 | 1.56E+05 | 24.6 | 6.26E−03 | 1.94E+05 | 32.3 |
| IL6R34 | 3.17E−03 | 2.15E+05 | 14.7 | 4.31E−03 | 2.28E+05 | 18.9 |
| ALB-1 | | | | | | |

### d) Epitope Mapping

[0959] Bispecific Nanobodies were analyzed for competition with Reference-Fab. The 14 purified bispecific Nanobodies were tested in Alphascreen for inhibition of the Reference-Fab/IL6R interaction. A fixed concentration of purified proteins (100 nM) was added to biotinylated IL6-R (1 nM) and incubated for 15 min. Subsequently Reference-Fab-coated acceptor beads were added and this mixture was incubated for 1 hour. Finally streptavidin donor beads were added and after 1 hour incubator the plate was read on the Envision microplate reader. BR-6, BN12 and the Reference-Fab were included as reference. Results, shown in Table C-16, are expressed as the % binding retained in competition with Reference-Fab. The lower the number, the higher the competition, the higher the overlap in epitope.

TABLE C-16
Inhibition of the Reference-Fab/IL6R interaction by 14 bispecific
(anti-IL6-R/anti-HSA) Nanobodies

| | % binding retained in competition |
|---|---|
| Nanobody ID | with Reference-Fab |
| IL6R22 | 71 |
| IL6R23 | 4 |
| IL6R24 | 35 |
| IL6R25 | 44 |
| IL6R26 | 25 |
| IL6R28 | 82 |
| IL6R29 | 37 |
| IL6R30 | 78 |
| IL6R31 | 37 |
| IL6R32 | 58 |
| IL6R33 | 17 |
| IL6R34 | 31 |

### e) Antagonistic Activity in Alphascreen

[0960] The 14 purified bispecific Nanobodies were tested in Alphascreen for inhibition of the IL6/IL6R interaction. Serial dilutions of purified proteins (concentration range: 500 nM-10 pM) were added to IL6-R (0.3 nM) and incubated for 15 min. Subsequently 3 nM bio-IL6 and BN12-coated acceptor beads were added and this mixture was incubated for 1 hour. Finally streptavidin donor beads were added and after 1 hour incubator the plate was read on the Envision microplate reader. BR-6 and the Reference-Fab fragment were included as reference. Dose-response curves, shown in FIGS. 16 and 17, were observed for Nanobodies with IC₅₀-values ranging from 55 pM to 1.7 nM (Table C-17).

TABLE C-17
IC50 values of 14 bispecific (anti-IL6-R/anti-HSA)
Nanobodies

| ID | IC50 (M) |
|---|---|
| IL6R21 | |
| IL6R22 | 5.594E−10 |
| IL6R23 | |
| IL6R24 | 1.451E−10 |
| IL6R25 | 6.429E−10 |
| IL6R26 | 1.666E−09 |
| IL6R27 | |
| IL6R28 | 3.259E−10 |
| IL6R29 | 1.234E−10 |
| IL6R30 | 3.431E−10 |
| IL6R31 | 1.309E−10 |
| IL6R32 | 2.678E−10 |
| IL6R33 | 1.386E−10 |
| IL6R34 | 1.455E−10 |

### f) Antagonistic Activity in Cell-Based Assay (XG-1)

[0961] All 14 bispecific Nanobodies were tested in the XG1 assay. XG1 is an IL6-dependent human myeloma cell line. Half-maximal proliferation is achieved at ˜20 pg/ml of IL6. Assays were essentially performed as described by Zhang et al. (Blood 83: 3654-3663). BR6, BN12 and the Reference-Fab were included as a reference. Results are outlined in FIGS. 18, 19 and 20. IC50 values ranged from 50 nM to 90 pM and are presented in Table C-18.

TABLE C-18
IC50 values of 14 bispecific (anti-IL6-R/anti-HSA) Nanobodies
measured in XG-1 cell based assay

| ID | IC50 (nM) |
|---|---|
| IL6R21 | |
| IL6R22 | 50.17 |
| IL6R23 | 13.97 |
| IL6R24 | 0.1542 |
| IL6R25 | 8.363 |
| IL6R26 | 65.33 |
| IL6R27 | |
| IL6R28 | 4.364 |
| IL6R29 | 3.022 |
| IL6R30 | 27.16 |
| IL6R31 | 4.566 |
| IL6R32 | 1.61 |
| IL6R33 | 1.574 |
| IL6R34 | 0.339 |

[0962] Nanobodies were also analyzed in the presence of 1 mg/mL human serum albumin. IC50 values range from 17 nM to 100 pM for monovalent Nanobodies and from 37 nM to 670 pM for bispecific Nanobodies. Results are shown in FIGS. 21 and 22 and Table C-19.

TABLE C-19
IC50 values of monovalent (anti-IL6R) and bispecific (anti-IL6-R/
anti-HSA) Nanobodies measured in XG-1 cell based assay

| ID | IC50 (nM) |
|---|---|
| IL6R03 | 17.54 |
| IL6R04 | 0.099 |
| IL6R09 | 2.985 |
| IL6R13 | 1.321 |
| IL6R14 | 0.751 |
| IL6R23 | 37.26 |
| IL6R24 | 0.667 |
| IL6R29 | 8.691 |
| IL6R33 | 8.071 |
| IL6R34 | 1.356 |

### Example 9

### Construction, Expression and Purification of Trivalent Anti-IL6-R Nanobodies

[0963] Nanobodies were also expressed as trivalent bispecifics consisting of an N-terminal anti-IL6R Nanobody, a C-terminal anti-IL6R Nanobody and an anti-HSA Nanobody (ALB-1) in the middle, connecting the different building blocks with a 9 amino acid Gly/Ser linker (SEQ ID NO's 478 to 492). These constructs were expressed in E. coli as c-myc, His6-tagged proteins and subsequently purified from the culture medium by immobilized metal affinity chromatography (IMAC) and size exclusion chromatography (SEC). SDS-PAGE of purified Nanobodies is shown in FIG. 23.

### Example 10

### Characterization of Trivalent Anti-IL6-R Nanobodies

### a) Binding to IL6R on Biacore

[0964] Affinity constants (Kd) of the 3 trivalent Nanobodies were determined by surface plasmon resonance on a Biacore 3000 instrument. In brief, IL6-R is amine-coupled to a CM5 sensor chip at a density of 800-1000 RU. Remaining reactive groups are inactivated. Nanobody binding is assessed at various concentrations ranging from 0.5 to 50 nM. Each sample is injected for 4 min at a flow rate of 45 μl/min to allow for binding to chip-bound antigen. Next, binding buffer without Nanobody is sent over the chip at the same flow rate to allow for dissociation of bound Nanobody. After 10 min, remaining bound analyte is removed by injecting regeneration solution (Glycine/HCl pH1.5). Avid binding could be demonstrated for the trivalent Nanobody IL6R49 (SEQ ID NO 480) as compared to the corresponding monovalent Nanobody IL6R09 or the bispecific Nanobody IL6R29 (FIG. 24).

### b) Binding to IL6R on U266 Cells

[0965] Flow cytometric analysis of bispecific trivalent IMAC-purified Nanobodies from selected clones (IL6R44 (SEQ ID NO 479), IL6R53 (SEQ ID NO 481)). IMAC-purified Nanobodies were added to IL6-R positive U266 cells. Detection was performed by a monoclonal anti-myc antibody followed by a PE-labeled polyclonal anti-mouse antibody. Nanobodies binding to cells was measured by an increase in fluorescence intensity as compared to cells that were incubated with FACS buffer (PBS+10% FBS) followed by monoclonal anti-myc antibody and/or PE-labeled polyclonal anti-mouse antibody. Results are shown in FIG. 25. Fluorescence intensity is blotted on the X-axis, the number of events on the Y-axis. Purified anti-IL6-R antibody BR-6 was included.

### c) Antagonistic Activity in Cell Based Assay (XG-1)

[0966] Purified trivalent Nanobodies IL6R44, IL6R49 and IL6R53 (SEQ ID NO's 479, 480 and 481) were tested in the XG1 assay. XG1 is an IL6-dependent human myeloma cell line. Half-maximal proliferation is achieved at ˜20 pg/ml of IL6. Assays were essentially performed as described by Zhang et al. (Blood 83: 3654-3663). BR6, BN12 and the Reference-Fab were included as a reference. Results are outlined in FIG. 26.

### Example 11

### Binding to Human, Cynomolgus Monkey and Mouse Serum Albumin in Biacore of Wild Type Trivalent Nanobody® Constructs

[0967] Binding of Nanobodies® to serum albumin was characterized by surface plasmon resonance in a Biacore 3000 instrument, and an equilibrium constant, K_{D}, was determined. In brief, serum albumin from different species was covalently bound to CM5 sensor chips surface via amine coupling until an increase of 500 response units was reached. Remaining reactive groups were inactivated. Nanobody® binding was assessed using a series of different concentrations. Each Nanobody® at each concentration was injected for 4 minutes at a flow rate of 45 μl/min to allow for binding to chip-bound antigen. Next, binding buffer without Nanobody® was sent over the chip at the same flow rate to allow dissociation of bound Nanobody®. After 15 min, remaining bound analyte was removed by injecting regeneration solution (50 mM NaOH).

[0968] From the sensorgrams obtained for the different concentrations of each analyte, K_{D} values were calculated via kinetic data analysis. Results are presented in Table C-20 below.

TABLE C-20
Kd values of trivalent bispecific Nanobodies to serum albumin from
different species

| Nanobody ID | Human SA | Mouse SA | Cyno SA |
|---|---|---|---|
| IL6R44 | 51.4 nM | 993 nM | 43 nM |
| IL6R53 | 35 nM | 497 nM | Not |
| | | | determined |

### Example 12

### Humanization

[0969] DNA fragments encoding humanized versions of Nanobodies® IL6R03, IL6R04 and IL6R13 were assembled from oligonucleotides using a PCR overlap extension method (Stemmer et al., 1995). The sequences of different variants are shown in FIG. 27.

### a) Antagonistic Activity in Alpha Screen

[0970] Humanized clones of IL6R03 (IL6R61, IL6R62, IL6R63, IL6R64 and IL6R65; SEQ ID NOs: 609 to 613), IL6R04 (IL6R71, IL6R72, IL6R73, IL6R74 and IL6R75; SEQ ID NOs: 614 to 618) and IL6R13 (IL6R81, IL6R82, IL6R83, IL6R84 and IL6R88; SEQ ID NOs: 619, 620, 621, 622 and 626, respectively) were tested in Alphascreen for inhibition of the IL6/IL6R interaction. Serial dilutions of purified proteins (concentration range: 500 nM-10 pM) were added to IL6-R (0.3 nM) and incubated for 15 min. Subsequently 3 nM bio-IL6 and BN12-coated acceptor beads were added and this mixture was incubated for 1 hour. Finally streptavidin donor beads were added and after 1 hour incubator the plate was read on the Envision microplate reader. BR-6 and the Reference-Fab fragment were included as reference. Dose-response curves are shown in FIGS. 28, 29, 30 and 31. No significant differences between the final different humanized clones (IL6R65, IL6R75 and IL6R88) and their corresponding non-humanized versions (IL6R03, IL6R04 and IL6R13, respectively) were observed.

### b) Temperature Stability Tests

[0971] Temperature stability tests were performed for humanized clones of IL6R03 (IL6R65), IL6R04 (IL6R75) and IL6R13 (IL6R81, IL6R82, IL6R83 and IL6R84). Samples were diluted at 200 μg/ml and divided in 5*2 aliquots containing 60 μl. The different vials were incubated each at a given temperature ranging from 37° C. to 90° C. (37, 50, 70 and 90° C.) for a period of 1 hr. (lid temperature: 105° C.) (control was stored at 4° C.). Thereafter, the samples were hold at 25° C. for 2 hrs (ramping rate: 0.05) and stored over night at 4° C. Precipitates were removed by centrifugation for 30 min at 14.000 rpm. Supernatant was carefully removed and further analysed. OD at 280 nm was measured and the concentration was calculated based on the extinction coefficients. Results are shown in FIGS. 32 and 33.

### c) Binding to IL6-R in Biacore

[0972] Humanized clones of IL6R03 (IL6R61, IL6R62, IL6R63, IL6R64 and IL6R65), IL6R04 (IL6R71, IL6R72, IL6R73, IL6R74 and IL6R75) and IL6R13 (IL6R81, IL6R82, IL6R83, IL6R84 and IL6R88) were selected for off-rate analysis on Biacore and DNA sequencing (Table C-21 and FIG. 27).

[0973] Affinity constants (Kd) of these Nanobodies were determined by surface plasmon resonance on a Biacore 3000 instrument. In brief, IL6-R is amine-coupled to a CM5 sensor chip at a density of 800-1000 RU. Remaining reactive groups are inactivated. Nanobody binding was assessed at various concentrations ranging from 0.5 to 50 nM. Each sample was injected for 4 min at a flow rate of 45 μl/min to allow for binding to chip-bound antigen. Next, binding buffer without Nanobody was sent over the chip at the same flow rate to allow for dissociation of bound Nanobody. After 10 min, remaining bound analyte was removed by injecting regeneration solution (Glycine/HCl pH1.5). Binding curves obtained at different concentrations of Nanobody were used to calculate Kd values. In Table C-21, an overview of k_{d}, kₐ, and K_{d} values for the humanized Nanobodies is shown.

TABLE C-21
Overview of K_{D}, kₐ and k_{d} values for binding of
humanized anti-IL-6 receptor Nanobodies ® to the
human Il-6 receptor.

| | | IL6R |
|---|---|---|
| IL6R61 | KD (nM) | 2 |
| | ka (1/Ms) | 8.50E+05 |
| | kd (1/s) | 1.70E−03 |
| IL6R62 | KD (nM) | 2.22 |
| | ka (1/Ms) | 9.29E+05 |
| | kd (1/s) | 2.07E−03 |
| IL6R63 | KD (nM) | 3.69 |
| | ka (1/Ms) | 9.90E+05 |
| | kd (1/s) | 3.65E−03 |
| IL6R64 | KD (nM) | |
| | ka (1/Ms) | |
| | kd (1/s) | 1.00E−03 |
| IL6R65 | KD (nM) | 4 |
| | ka (1/Ms) | 6.00E+05 |
| | kd (1/s) | 2.35E−03 |
| IL6R71 | KD (nM) | 0.22 |
| | ka (1/Ms) | 7.03E+05 |
| | kd (1/s) | 1.53E−04 |
| IL6R72 | KD (nM) | 0.33 |
| | ka (1/Ms) | 5.43E+05 |
| | kd (1/s) | 1.80E−04 |
| IL6R73 | KD (nM) | 0.33 |
| | ka (1/Ms) | 6.98E+05 |
| | kd (1/s) | 2.33E−04 |
| IL6R74 | KD (nM) | 0.16 |
| | ka (1/Ms) | 7.67E+05 |
| | kd (1/s) | 1.22E−04 |
| IL6R75 | KD (nM) | <0.1 |
| | ka (1/Ms) | 1.00E+06 |
| | kd (1/s) | <1E−04 |
| IL6R81 | KD (nM) | 0.4 |
| | ka (1/Ms) | 3.20E+05 |
| | kd (1/s) | 1.28E−04 |
| IL6R82 | KD (nM) | 5.07 |
| | ka (1/Ms) | 6.19E+05 |
| | kd (1/s) | 3.14E−03 |
| IL6R83 | KD (nM) | 0.34 |
| | ka (1/Ms) | 3.50E+05 |
| | kd (1/s) | 1.20E−04 |
| IL6R84 | KD (nM) | 5.36 |
| | ka (1/Ms) | 7.62E+05 |
| | kd (1/s) | 4.09E−03 |
| IL6R85 | KD (nM) | |
| | ka (1/Ms) | |
| | kd (1/s) | 2.06E−03 |
| IL6R86 | KD (nM) | |
| | ka (1/Ms) | |
| | kd (1/s) | 1.70E−03 |
| IL6R87 | KD (nM) | |
| | ka (1/Ms) | |
| | kd (1/s) | 1.05E−04 |
| IL6R88 | KD (nM) | 0.9 |
| | ka (1/Ms) | 2.30E+05 |
| | | 2.13E−04 |
| | kd (1/s) | 3.10E−04 |
| IL6R89 | KD (nM) | |
| | ka (1/Ms) | |
| | kd (1/s) | 1.90E−04 |
| IL6R90 | KD (nM) | |
| | ka (1/Ms) | |
| | kd (1/s) | 1.92E−03 |

### Example 13

### Antagonistic Activity in Cell-Based Assay (XG-1) of Humanized Nanobodies

[0974] Humanized Nanobodies were analysed in the XG-1 assay. XG-1 is an IL6-dependent human myeloma cell line. Half-maximal proliferation is achieved using ˜20 pg/ml IL6. Assays were performed as described by Zhang et al. (Blood 83: 3654-3663). BR6, BN12 were included as a reference. Results are shown in FIG. 34.

### Example 14

### Construction of Bivalent and Trivalent Humanized Nanobodies

[0975] Nanobodies were constructed to bivalent (SEQ ID NO's 559 to 602) and trivalent (SEQ ID NO's 493 to 558) constructs using the humanized anti-IL6R building blocks and humanized anti-serum albumin building blocks. A 9-amino acid GlySer linker was used to link the different building blocks. These constructs were expressed in E. coli and purified using ProtA followed by size exclusion chromatography (SEC).

### Example 15

### Binding to IL6-R in Biacore of Humanized Bivalent and Trivalent Nanobodies

[0976] Affinity constants (Kd) of the bispecific bivalent and trivalent humanized Nanobodies were determined by surface plasmon resonance on a Biacore 3000 instrument. In brief, IL6-R was amine-coupled to a CM5 sensor chip at a density of 800-1000 RU. Remaining reactive groups were inactivated. Nanobody binding was assessed at various concentrations ranging from 0.5 to 50 nM. Each sample was injected for 4 min at a flow rate of 45 μl/min to allow for binding to chip-bound antigen. Next, binding buffer without Nanobody was sent over the chip at the same flow rate to allow for dissociation of bound Nanobody. After 10 min, remaining bound analyte was removed by injecting regeneration solution (Glycine/HCl pH 1.5). Binding curves obtained at different concentrations of Nanobody were used to calculate Kd values. In Table C-22 an overview of k_{d}/k_{off}, kₐ, and K_{d} values for the bispecific Nanobodies is shown.

TABLE C-22
Overview of k_{d}/k_{off}, kₐ and K_{d}-values for binding
of bispecific humanized bivalent and trivalent Nanobodies to IL6-R

| Nanobody ID | k_{d}/k_{off} (s⁻¹) | kₐ (1/Ms) | K_{d} (nM) |
|---|---|---|---|
| IL6R202 | 5.7-4.5E+05 | 1.4-1.45E−04 | 0.25-0.32 |
| IL6R203 | 3.8E+05 | ~1.5E−05 | ~0.040 |

### Example 16

### Binding to Serum Albumin from Different Species of Humanized Bivalent and Trivalent Nanobodies

[0977] Binding of Nanobodies® to serum albumin was characterized by surface plasmon resonance in a Biacore 3000 instrument, and an equilibrium constant, K_{D}, was determined. In brief, serum albumin from different species was covalently bound to CM5 sensor chips surface via amine coupling until an increase of 500 response units was reached. Remaining reactive groups were inactivated. Nanobody® binding was assessed using a series of different concentrations. Each Nanobody® at each concentration was injected for 4 minutes at a flow rate of 45 μl/min to allow for binding to chip-bound antigen. Next, binding buffer without Nanobody® was sent over the chip at the same flow rate to allow dissociation of bound Nanobody®. After 15 min, remaining bound analyte was removed by injecting regeneration solution (50 mM NaOH).

[0978] From the sensorgrams obtained for the different concentrations of each analyte, K_{D} values were calculated via kinetic data analysis. Results are presented in Table C-23 below.

TABLE C-23
Overview of k_{d}/k_{off}, kₐ and K_{d}-values for
binding of humanized bivalent and trivalent Nanobodies to serum
albumin from different species
Cyno serum albumin

| Nanobody ID | k_{d}/k_{off} (s⁻¹) | kₐ (1/Ms) | K_{d} (nM) |
|---|---|---|---|
| IL6R202 | 1.19E+05 | 5.20E−03 | 43.6 |
| IL6R203 | 8.06E+04 | 4.36E−03 | 54.1 |

Mouse serum albumin

| Nanobody ID | K_{d} (nM) |
|---|---|
| IL6R202 | 493 |
| IL6R203 | 1009 |

Human serum albumin

| Nanobody ID | k_{d}/k_{off} (s⁻¹) | kₐ (1/Ms) | K_{d} (nM) |
|---|---|---|---|
| IL6R202 | 1.07E+5 | 5.56E−03 | 52.1 |
| IL6R203 | 6.47E+04 | 4.53E−03 | 70 |

### Example 17

### Antagonistic Activity in Cell-Based Assay (TF-1)

[0979] The TF-1 cell (ECACC) line was maintained between 2-9×100,000 cells/mL using RPMI 1640 supplemented with 2 mM Glutamine, 1% Sodium pyruvate, 3 ng/mL Human GM-CSF (eBiosciences) and 10% Foetal Bovine serum (Gibco). Cells were subcultured 3 times a week and were maintained at 37% and a 5% CO₂ atmosphere. The same batch of GM-CSF (Lot E019991) and of Foetal Bovine Serum (lot no 41Q4556K) was used.

[0980] The cell-based assay was performed similarly as described in de Hon, F. D., Ehlers, M., Rose-John, S., Ebeling, S. B., Bos, H. K., Aarden, L. A., and Brakenhoff, J. P. (1994) J Exp Med 180, 2395-2400. Cell suspensions were centrifuged for 5 min at 200 g and the supernatant was removed. Cells were resuspended in RPMI 1640 supplemented with 2 mM Glutamine, 1% Sodium pyruvate and 10% Foetal Bovine serum, were seeded at a density of 12500 cells/well in a 96-well plate and incubated for 72 h with different dilutions of Nanobodies® and a constant amount of 500 pg/mL IL-6. The 96-well plates were incubated in a humid chamber. Every sample was analysed in triplicate. The total volume/well was 200 μL. During the last 6 h of the incubation, cells were pulse-labeled with 0.2 μCi/well of ³H-thymidine (GE Healthcare) in a total volume of 20 μL. Cells were harvested with a semiautomatic cell harvester (Filtermate harvester, PerkinElmer) and the ³H-thymidine incorporation was measured using a Topcount NXT counter (PerkinElmer). Results are expressed as average counts per minute (cpm) per well. IC 50 values are summarised in Table C-24.

TABLE C-24
IC50 values obtained in TF-1 assay of humanized bivalent and trivalent
Nanobodies
IC50 value (nM)

| Nanobody | IC50 (nM) | Stand. Dev. |
|---|---|---|
| IL6R202 | 0.180 | 0.061 |
| IL6R203 | 0.056 | 0.019 |

### Example 18

### Antagonistic Activity in Cell-Based TF-1 Assay in Presence of Serum Albumin

[0981] To test the potential of the bivalent and trivalent Nanobodies to block the IL-6/IL6R interaction, a proliferation assay was performed using the IL-6 sensitive TF1 erythroleukemia cell line. Briefly, serial dilutions of the Nanobodies (pre-incubated with 1% serum albumin) were added to 1.25×10⁴ TF-1 cells in triplicate in the presence of a fixed concentration of IL-6 (200 pg/ml). After 72 h incubation, cells were pulsed with 0.5 μCi of [³H]thymidine and incubated for an additional 6 h prior to freezing at −80° C. Cells were subsequently thawed and embedded on glass fiber membranes using a cell harvester (Perkin Elmer Life Sciences, Wellesley, Mass., USA). After several washings with water, filters were air-dried and counted using a γ-counter (Perkin Elmer Life Sciences). The monoclonal antibody BR-6 known to neutralize the IL6/IL6R interaction was used as positive control. The non-neutralizing monoclonal antibody BN-12 was used as negative control. Results are summarized in the table C-25.

TABLE C-25
IC50 values of inhibition of IL-6/IL6R interaction by bivalent and
trivalent anti-IL6R Nanobodies

| Compound | IC50 (w/o HSA) | IC50 (+ 1% HSA) |
|---|---|---|
| IL6R24 | 0.305 ± 0.073 (n = 4) | 0.870 ± 0.326 (n = 4) |
| IL6R44 | 0.122 ± 0.132 (n = 4) | 0.144 ± 0.052 (n = 4) |
| IL6R202 | 0.190 ± 0.056 (n = 2) | 0.6 ± 0.141 (n = 2) |
| IL6R203 | ND | 0.092 (n = 1) |
| BR6 | 0.042 ± 0.014 (n = 2) | 0.088 ± 0.036 (n = 3) |

### Example 19

### Binding of Anti-hIL-6R Nanobodies to Cynomolgus Monkey IL-6R Positive Cells

[0982] To verify whether the anti-human IL-6R Nanobodies are able to recognize cynomolgus IL-6R, binding to CHO-K1 cells that are stably transfected with cynomolgus IL-6R was assessed by flow cytometry.

[0983] Cell binding assays were carried out by initially incubating 200,000 cells with purified Nanobodies. After incubation, the cells were washed with FACS buffer. Cells were subsequently incubated with phycoerythrin labeled rabbit anti-V_{HH} antiserum. To omit signals arising from dead cells a TOPRO-3 (Invitrogen) staining was carried out. Cells were finally analyzed on a BD FACSArray Bioanalyzer System (BD Biosciences).

[0984] FIG. 35 depicts binding of Nanobody constructs to cyno IL-6R transfected CHO-K1 cells as measured by flow cytometric analysis. It can be seen that the constructs IL6R-24, IL6R-44, IL6R-202 and IL6R-203 show clearly discernable shifts in fluorescence intensity as compared to the fluorescence intensity for cells incubated only with FACS buffer alone in the absence of any construct but with all appropriate detection agents as used for the detection of Nanobody constructs.

### Example 20

### Anti-Human IL-6R Nanobodies Compete with Human IL-6 for Binding to Cynomolgus IL-6R

[0985] To evaluate the capacity of expressed Nanobodies to block the binding of human IL-6 to cynomolgus IL-6R, a human IL-6 competitive homogeneous cell-based assay was performed. The FMAT 8200 HTS system (Applied Biosystems) assay was performed as follows: CHO-K1 cells stably expressing cynomolgus IL-6R were detached using 0.25% (vol/vol) trypsin and suspended in RPMI supplemented with 10% fetal calf serum (FCS), glutamine, and penicillin-streptomycin. Aliquots of 60 μl (4×10³ cells) were plated into FMAT system 384-well plates (PE Biosystems, CA) and allowed to adhere for 24 h. After overnight adherence, culture supernatant was removed by gently tapping the plate. To initiate the competitive screen, 20 μl ALEXA⁶⁴⁷-labeled human IL-6 (625 pM final concentration) and 20 μl Nanobody or cold h-IL6 dilution were added to the cell-containing FMAT system 384-well plates (PE Biosystems, CA). The plates were scanned after 10 hours of incubation. A well was considered positive if it had a count of over 50 events. FIGS. 36 and 37 depict the results of experiments measuring the capacity of anti hIL-6R Nanobodies to block binding of hIL-6 to cynomolgus IL-6R as measured by competitive FMAT. It can be seen that the constructs IL6R-202 and IL6R-203 clearly compete with the binding of hIL-6 to cynomolgus IL-6R. The positive control cold hIL-6 shows, as expected, clearly discernable competition with ALEXA⁶⁴⁷-labeled hIL-6.

### Example 21

### Construction of Anti-IL-6R Nanobody—Human Serum Albumin Fusion Proteins

[0986] HSA was constructed by gene assembly and cloned into pPICZaA as XhoI/NotI fragment.

[0987] For the generation of a NB04-HSA fusion protein, NB04 was amplified by PCR using primer pair: 5′-GGGTATCTCTCGAGAAAAGAGAGGCTGAAGCTGAGGTGCAG CTGGTGGAGTCTGGG-3′ and 5′-TCTCTTCTCCTAGGTCTTTGAATCTGTGGGC GACTTCAGAT TTATGAGCATCTGAGGAGACGGTGACCTG-3′.

[0988] The resulting PCR product was cloned into PCR4TOPO and used to clone IL6R04 N-terminally of HSA. Hereto, pPICZaA HSA and TOPO NB04-N were digested with XhoI and AvrII and ligated to each other.

[0989] To connect NB04 to the C-terminus of HSA interspaced with a linker, the following nested-PCR was performed: NB04 was first amplified by PCR using primer pair:

5′-GTGGATCCGGAGGCAGTGGAGGTTCTGGTGGGTCAGGAGGTGAG
GTGCAGCTGGTGGAGTCTGGG-3′ and 5′-TAGAAAGCTGGCGGCCG
CTTATTATGAGGAGACGGTGACCTG-3′.

[0990] A second PCR was performed on the obtained product to insert a GlySer linker by use of primer pair 5′-TTGGTTGCGGCCAGTCAGGCCGCACTTGGTTTGGGTGGAT CCGGAGGCAGTG-3′ and 5′-TAGAAAGCTGGCGGCCGCTTATTATGAGGA GACGGTGACCTG-3′.

[0991] The resulting PCR product was cloned into PCR4TOPO and used to clone NB04 at the C-terminus of HSA. Hereto, pPICZaA HSA and TOPO NB04-C were digested with NotI and SfiI and ligated to each other.

### Example 22

### Binding of IL6R04-HSA and HSA-IL6R04 to IL-6R-Positive Cell Lines in Flow Cytometric Analysis

[0992] The test for binding to the IL-6R positive human multiple myeloma cell line U266 was carried out with purified IL6R04-HSA (SEQ ID NO 604), HSA-IL6R04 (SEQ ID NO 603) and IL6R04 (SEQ ID NO 440) using the commercially available murine anti-human IL6R antibodies BR6 and BN12 as positive controls.

[0993] Cell binding assays were carried out by initially incubating 200,000 cells with 5 nM purified Nanobody-HSA fusion proteins. After incubation, the cells were washed with FACS buffer. Cells were subsequently incubated with phycoerythrin labeled rabbit anti-V_{HH} antiserum. To omit signals arising from dead cells a TOPRO-3 (Invitrogen) staining was carried out. Cells were finally analyzed on a BD FACSArray Bioanalyzer System (BD Biosciences).

[0994] FIG. 38 depicts binding of the Nanobody-HSA fusion constructs to U266 cells as measured by flow cytometric analysis. The positive controls BR6 and BN12 show, as expected, a clearly discernable shift in fluorescence intensity as compared to the respective control (anti-IgG^{PE}). The constructs IL6R04-HSA and HSA-IL6R04 tested show binding to the IL6R-positive U266 cells as indicated by the shifts in fluorescence intensity as compared to the fluorescence intensity for cells incubated only with FACS buffer in the absence of any construct but with all appropriate detection agents as used for the detection of the Nanobody constructs. No obvious difference in binding to U266 cells was observed between IL6R04-HSA, HSA-IL6R04 and the monovalent IL6R04 Nanobody.

### Example 23

### Screening of Kinetic Off-Rate Constants via Surface Plasmon Resonance (BIAcore)

[0995] Affinity constants (Kd) of the anti-IL6R Nanobody-HSA constructs were determined by surface plasmon resonance on a Biacore 3000 instrument. In brief, IL6-R is amine-coupled to a CM5 sensor chip at a density of 800-1000 RU. Remaining reactive groups are inactivated. Nanobody binding is assessed at various concentrations ranging from 0.5 to 50 nM. Each sample is injected for 4 min at a flow rate of 45 μl/min to allow for binding to chip-bound antigen. Next, binding buffer without Nanobody is sent over the chip at the same flow rate to allow for dissociation of bound Nanobody. After 10 min, remaining bound analyte is removed by injecting regeneration solution (Glycine/HCl pH 1.5). Binding curves obtained at different concentrations of Nanobody are used to calculate Kd values. The binding characteristics are summarized in Table C-26.

TABLE C-26
Surface plasmon resonance measurements of the interaction between
hIL-6R and anti-IL6R Nanobody-HSA constructs

| | Ka (1/Ms) | Kd (1/s) | KD (nM) |
|---|---|---|---|
| IL6R04 | 5.36E+05 | 1.12E−04 | 0.20 |
| HSA-IL6R04 | 2.52E+05 | 5.62E−05 | 0.22 |
| IL6R04-HSA | 1.89E+05 | 5.60E−05 | 0.30 |

### Example 24

### Anti-IL6R Nanobody-Albumin Fusion can Block hIL-6 Induced Proliferation of the Erythroleukemia Cell Line TF1

[0996] To test the potential of the anti-IL6R Nanobody-albumin fusions to block the IL-6/IL6R interaction, a proliferation assay was performed using the IL-6 sensitive TF1 erythroleukemia cell line. Briefly, serial dilutions of the anti-IL6R Nanobody-albumin fusions were added to 1.25×10⁴ TF-1 cells in triplicate in the presence of a fixed concentration of IL-6 (200 pg/ml). After 72 h incubation, cells were pulsed with 0.5 μCi of [³H]thymidine and incubated for an additional 6 h prior to freezing at −80° C. Cells were subsequently thawed and embedded on glass fiber membranes using a cell harvester (Perkin Elmer Life Sciences, Wellesley, Mass., USA). After several washings with water, filters were air-dried and counted using a γ-counter (Perkin Elmer Life Sciences). The monoclonal antibody BR-6 known to neutralize the IL6/IL6R interaction was used as positive control. The non-neutralizing monoclonal antibody BN-12 was used as negative control.

[0997] As shown in FIG. 39, both IL6R04-HSA and HSA-IL6R04 can efficiently block the IL-6 dependent proliferation of TF1 cells. As expected, antibody BR-6 efficiently blocked IL-6 dependent proliferation of TF1 cells whereas BN-12 had no effect.

### Example 25

### Generation of Multivalent Nanobody-Albumin Fusion Protein Formats

[0998] To potentially increase the biological effect of Nanobody-albumin molecules, bivalent fusions are generated whereby 2 Nanobodies are fused at the N-terminal side of serum albumin. The Nanobodies are fused head-to-tail using an amino acid linker peptide consisting of different lengths.

[0999] Here we describe the construction and characterization of bivalent Nanobody-albumin fusion proteins consisting of two identical anti-IL6-R Nanobodies separated by a 3 Ala, 9 (GS) or 20 (GS) amino acid linker peptide. DNA segments encoding Nanobody IL6R-201 were head-to-tail genetically linked and fused to human serum albumin at its N-terminal side, resulting in constructs IL6R201-HSA (SEQ ID NO 605), IL6R201-AAA-IL6R201-HSA (SEQ ID NO 608), IL6R201-9GS-IL6R201-HSA (SEQ ID NO 606), IL6R201-20GS-IL6R201-HSA (SEQ ID NO 607). All Nanobody-albumin fusion proteins were expressed in Pichia pastoris in shake flasks or in a fermentor. Production levels of >50 mg/l were obtained.

### Example 26

### Fusion of Nanobody to Albumin Increases its Serum Half-Life

[1000] The pharmacokinetic study of a HSA fusion Nanobody was conducted in Balbc mice. The mice are preferably 8 up to 12 weeks old. We tested the pharmacokinetic profile from Nanobody, IL6R04-HSA and Nanobody HSA-IL6R04. The Nanobody was injected in three mice. The mice were administrated with 200 μg/200 μl via an intravenous infusion. Blood samples were taken at 15′, 1 h, 2 h, 4 h, 8 h, 24 h, day 2, day 3, day 4, day 5, day 8 and day 15 after the start of infusion. 1041 whole blood was withdrawn per sampling and the serum was isolated after 1 hr incubation at 37° C. The plasma samples are stored by −20° C.

[1001] Serum samples were tested for the determination of plasma levels of half-life extension Nanobodies.

[1002] Micro titer plates (Maxisorb) are coated with 0.5 μg/ml sIL-6R (Prepotech) in PBS at 100 μl/well overnight at 4° C. The plates are washed with PBS containing 0.1% Tween20 and blocked for 2 hours at RT with PBS containing 1% casein. Plasma samples are then diluted in a non-coated plate and incubated for 30 minutes at room temperature. 100 μl of all the dilutions is then transferred to the coated plate and allowed to bind for 1 hour at room temperature. After 1 hour, the plate is washed and 100 ul of 1/2000 dilution of biotinylated goat anti-human albumin in PBS containing 1% casein is added per well. After further incubation for half an hour at room temperature, wells are washed and 100 μl of 1/2000 dilution of streptavidin conjugated with horse radish peroxidase in PBS containing 1% casein. This enzyme catalyzes a chemical reaction with the substrate slow TMB, which results in a colorimetric change. After stopping this reaction with HCl, the intensity of the color can be measured by a spectrophotometer, which determines the optical density of the reaction product, using a 450 nm wavelength of light.

[1003] The half-life extension Nanobody concentration in the plasma samples is determined towards a standard curve. The concentration determination is determined with the sigmoidal dose-response curve with variable slope.

[1004] FIG. 40 shows that the albumin fusion prolonges the half-life of a monovalant Nanobody targeting IL6R (IL6R-HSA) and has been determined to be 1.10 days.

[1005] The half-life for HSA-IL6R04 has been determined to be 1.0 days.

[1006] As a non-formatted Nanobody is cleared within the first hour, the increase in half-life by fusing with human albumin is more than 25 fold.

### Example 27

### Pharmacokinetic Profile in Cynomolgus Monkey

[1007] A pharmacokinetic study of IL6R202, IL6R203 and IL6R04HSA was conducted in cynomolgus monkeys. The Nanobody was administered intravenously by bolus injection (1.0 ml/kg, approximately 30 sec) in the vena cephalica of the left or right arm to obtain a dose of 2.0 mg/kg. Table C-27 summarizes the dosing regimen for all monkeys.

TABLE C-27
Dosing regimen of all animals

| | | | | | Dose Volume | Dose |
|---|---|---|---|---|---|---|
| Group | Test item | Route | Animal | Animal ID | (ml/kg) | (mg/kg) |
| 1 | IL6R04- | Iv | Cynomolgus | 1 m | 1.0 | 2.0 |
| | HSA | (bolus) | Monkey | | | |
| | | Iv | Cynomolgus | 2 f | 1.0 | 2.0 |
| | | (bolus) | Monkey | | | |
| 2 | IL6R202 | Iv | Cynomolgus | 3 m | 1.0 | 2.0 |
| | | (bolus) | Monkey | | | |
| | | Iv | Cynomolgus | 4 f | 1.0 | 2.0 |
| | | (bolus) | Monkey | | | |
| 3 | IL6R203 | Iv | Cynomolgus | 5 m | 1.0 | 2.0 |
| | | (bolus) | Monkey | | | |
| | | Iv | Cynomolgus | 6 f | 1.0 | 2.0 |
| | | (bolus) | Monkey | | | |

The anti-IL6R Nanobody concentration in the plasma samples was determined as follows:

### a) Immunodetection of IL6R04-HSA in Plasma Samples

[1008] Maxisorb micro titer plates (Nunc, Article No. 430341) were coated overnight at 4° C. with 100 μl of a 0.5 μg/ml solution of sIL6R (Peprotech, Article No. 20006R) in DPBS (pH 7.4). After coating, the plates were washed three times (PBS containing 0.1% Tween20) and blocked for 2 hours at room temperature (RT) with PBS containing 1% casein (250 μl/well). Plasma samples and serial dilutions of Nanobody-standards (spiked in 100% pooled blank cynomolgus plasma) were diluted in PBS (in a separate non-coated plate) to obtain the desired concentration/dilution in a final sample matrix consisting of 10% pooled cynomolgus plasma in PBS. All pre-dilutions were incubated for 30 minutes at RT in the non-coated plate. After the blocking step, plates were washed three times (PBS containing 0.1% Tween20), and an aliquot of each sample dilution (100 μl) was transferred to the coated plates and allowed to bind for 1 hour at RT. After sample incubation, the plates were washed three times (PBS containing 0.1% Tween20) and incubated with 100 μl of 1/2000 dilution (in PBS containing 0.1% casein) of polyclonal goat anti-human serum albumin (Nordic Immunology, Article No. 5184). After 1 hour at RT, the plates were washed three times (PBS containing 0.1% Tween20) and incubated with 100 μl of a 1/2000 dilution (in PBS containing 1% casein) of streptavidine conjugated with horseradish peroxidase (DaktoCytomation, Article No. P0397). After 30 minutes, plates were washed three times (PBS containing 0.1% Tween20) and incubated with 100 μl of slow TMB (Pierce, Article No. 34024). After 20 minutes, the reaction was stopped with 100 μl HCl (1N). The absorbance of each well was measured at 450 nm (Tecan Sunrise spectrophotometer), and corrected for absorbance at 620 nm. This assay measures free and sIL6R-bound IL6R04-HSA Nanobodies. Concentration in each plasma sample was determined based on a sigmoidal standard curve with variable slope of the respective Nanobody. The LLOQ and ULOQ of IL6R04-HSA were 2.00 ng/ml and 100 ng/ml, respectively. Each individual plasma sample was analyzed in three independent assays and an average plasma concentration was calculated for pharmacokinetic data analysis.

### b) Immunodetection of IL6R202 and IL6R203 in Plasma Samples

[1009] Maxisorb micro titer plates (Nunc, Article No. 430341) were coated overnight at 4° C. with 100 μl of a 5 μg/ml solution of 12B2-GS9-12B2 (B2#1302nr4.3.9) in bicarbonate buffer (50 mM, pH 9.6). After coating, the plates were washed three times with PBS containing 0.1% Tween20 and blocked for 2 hours at room temperature (RT) with PBS containing 1% casein (250 μl/well). Plasma samples and serial dilutions of Nanobody-standards (spiked in 100% pooled blank cynomolgus plasma) were diluted in PBS in a separate non-coated plate (Nunc, Article No. 249944) to obtain the desired concentration/dilution in a final sample matrix consisting of 10% pooled cynomolgus plasma in PBS. All pre-dilutions were incubated for 30 minutes at RT in the non-coated plate. After the blocking step, the coated plates were washed three times (PBS containing 0.1% Tween20), and an aliquot of each sample dilution (100 μl) was transferred to the coated plates and allowed to bind for 1 hour at RT. After sample incubation, the plates were washed three times (PBS containing 0.1% Tween20) and incubated for 1 hour at RT with 100 μl of a 100 ng/ml solution of sIL6R in PBS (Peprotech, Article No. 20006R). After 1 hour at RT, the plates were washed three times (PBS containing 0.1% Tween20) and incubated with 100 μl of a 250 ng/ml solution of a biotinylated polyclonal anti-IL6R antibody in PBS containing 1% casein (R&D systems, Article No. BAF227). After incubation for 30 minutes (RT), plates were washed three times (PBS containing 0.1% Tween20) and incubated for 30 minutes (RT) with 100 μl of a 1/5000 dilution (in PBS containing 1% casein) of streptavidine conjugated with horseradish peroxidase (DaktoCytomation, Article No. P0397). After 30 minutes, plates were washed three times (PBS containing 0.1% Tween20) and incubated with 100 μl of slow TMB (Pierce, Article No. 34024). After 20 minutes, the reaction was stopped with 100 μl HCl (1N). The absorbance of each well was measured at 450 nm (Tecan Sunrise spectrophotometer), and corrected for absorbance at 620 nm. This assay measures free Nanobody as well as Nanobodies bound to sIL6R and/or cynomolgus serum albumin. Concentration in each plasma sample was determined based on a sigmoidal standard curve with variable slope of the respective Nanobody. The LLOQ and ULOQ of IL6R202 were 7.00 ng/ml and 300 ng/ml, respectively. The LLOQ and ULOQ of IL6R203 were 2.00 ng/ml and 70.0 ng/ml, respectively.

[1010] Each individual plasma sample was analyzed in two independent assays and an average plasma concentration was calculated for pharmacokinetic data analysis.

[1011] Mean observed plasma concentration-time profiles (±SD) after intravenous administration of IL6R04-HSA (2.0 mg/kg), IL6R202 or IL6R203 are shown in FIG. 41.

[1012] Basic pharmacokinetic parameters of IL6R04-HSA, IL6R202 and IL6R203 after a single intravenous administration at 2.00 mg/kg in the male and female cynomolgus monkey are listed in Tables C-28, C-29 and C-30, respectively. All parameters were calculated with two-compartmental modeling, with elimination from the central compartment.

TABLE C-28
Basic pharmacokinetic parameters¹ of IL6R04-HSA after a single intravenous
administration at 2.00 mg/kg in the male and female Cynomolgus Monkey.

| | Monkey 1 m | Monkey 2 f² | Mean SD | CV(%) |
|---|---|---|---|---|
| C₍₀₎ (μg/ml) | 50.6 | 49.0 | 49.8 ± 1.13 | 2.27 |
| Vₛₛ (mL/kg) | 79.1 | 77.2 | 78.2 ± 1.34 | 1.72 |
| V_{z} (mL/kg) | 84.4 | 80.8 | 82.6 ± 2.55 | 3.08 |
| V_{c} (mL/kg) | 39.6 | 40.8 | 40.2 ± 0.849 | 2.11 |
| Vₜ (mL/kg) | 39.5 | 36.4 | 38.0 ± 2.19 | 5.78 |
| CL (mL/day/kg) | 10.3 | 10.5 | 10.4 ± 0.141 | 1.36 |
| CL_{d} (mL/day/kg) | 41.6 | 55.7 | 48.7 ± 9.97 | 20.5 |
| t_{1/2α} (day) | 0.309 | 0.229 | 0.269 ± 0.0566 | 21.0 |
| t_{1/2β} (day) | 5.69 | 5.33 | 5.51 ± 0.255 | 4.62 |
| MRT (day) | 7.70 | 7.37 | 7.54 0.233 | 3.10 |
| AUC_{inf} | 194 | 191 | 193 ± 2.12 | 1.10 |
| (μg · day/ml) | | | | |
| AUC_{inf}/D | 0.0970 | 0.0955 | 0.0963 ± 0.00106 | 1.10 |
| (kg · day/ml) | | | | |

¹All parameters were calculated with two-compartmental modeling
²Estimate of PK parameters should be interpreted with caution because the method of calculation ignores the immunological clearance due to neutralizing antibodies.

TABLE C-29
Basic pharmacokinetic parameters¹ of IL6R202 after a single intravenous
administration at 2.00 mg/kg in the male and female Cynomolgus Monkey.

| | Monkey 3 m | Monkey 4 f | Mean SD | CV(%) |
|---|---|---|---|---|
| C₍₀₎ (μg/ml) | 57.6 | 56.5 | 57.1 ± 0.778 | 1.36 |
| Vₛₛ (mL/kg) | 65.1 | 60.6 | 62.9 ± 3.18 | 5.06 |
| V_{z} (mL/kg) | 70.0 | 64.6 | 67.3 ± 3.82 | 5.67 |
| V_{c} (mL/kg) | 34.7 | 35.4 | 35.1 ± 0.495 | 1.41 |
| Vₜ (mL/kg) | 30.4 | 25.2 | 27.8 ± 3.68 | 13.2 |
| CL (mL/day/kg) | 6.97 | 6.74 | 6.86 ± 0.163 | 2.37 |
| CL_{d} (mL/day/kg) | 22.1 | 19.1 | 20.6 ± 2.12 | 10.3 |
| t_{1/2α} (day) | 0.474 | 0.500 | 0.487 ± 0.0184 | 3.78 |
| t_{1/2β} (day) | 6.96 | 6.64 | 6.80 ± 0.226 | 3.33 |
| MRT (day) | 9.35 | 8.99 | 9.17 0.255 | 2.78 |
| AUC_{inf} | 287 | 297 | 292 ± 7.07 | 2.42 |
| (μg · day/ml) | | | | |
| AUC_{inf}/D | 0.144 | 0.148 | 0.146 ± 0.00283 | 1.94 |
| (kg · day/ml) | | | | |

¹All parameters were calculated with two-compartmental modeling

TABLE C-30
Basic pharmacokinetic parameters of IL6R203 after a single intravenous
administration at 2.00 mg/kg in the male and female Cynomolgus Monkey.

| | Monkey 5 m | Monkey 6 f | Mean SD | CV(%) |
|---|---|---|---|---|
| C₍₀₎ (μg/ml) | 67.1 | 87.8 | 77.5 ± 14.6 | 18.9 |
| Vₛₛ (mL/kg) | 41.5 | 34.1 | 37.8 ± 5.23 | 13.8 |
| V_{z} (mL/kg) | 42.5 | 35.2 | 38.9 ± 5.16 | 13.3 |
| V_{c} (mL/kg) | 29.8 | 22.8 | 26.3 ± 4.95 | 18.8 |
| Vₜ (mL/kg) | 11.7 | 11.3 | 11.5 ± 0.283 | 2.46 |
| CL (mL/day/kg) | 6.98 | 7.11 | 7.05 ± 0.0919 | 1.30 |
| CL_{d} (mL/day/kg) | 22.7 | 27.2 | 25.0 ± 3.18 | 12.8 |
| t_{1/2α} (day) | 0.250 | 0.187 | 0.219 ± 0.0445 | 20.4 |
| t_{1/2β} (day) | 4.22 | 3.43 | 3.83 ± 0.559 | 14.6 |
| MRT (day) | 5.94 | 4.80 | 5.37 0.806 | 15.0 |
| AUC_{inf} | 286 | 281 | 284 ± 3.54 | 1.25 |
| (μg · day/ml) | | | | |
| AUC_{inf}/D | 0.143 | 0.141 | 0.142 ± 0.00141 | 1.00 |
| (kg · day/ml) | | | | |

¹All parameters were calculated with two-compartmental modeling

### Example 28

### Efficacy in Cynomolgus Monkey

[1013] In human and non-human primates, human IL-6 (hIL-6) has been reported to induce acute phase protein synthesis (Gauldi et al, 1987; Asano et al., 1990). Acute phase proteins are defined as a set of plasma proteins, like C-reactive protein (CRP), serum amyloid A, haptoglobin, fibrinogen, albumin, transferrin and C3, increasing or decreasing concentrations by at least 25% in inflammatory disorders, mainly due to changes in their production by hepatocytes (Gabay & Kushner, 1999). Patterns of cytokine production and acute phase response differ in different inflammatory conditions. Therefore, acute phase changes reflect the presence and intensity of inflammation, making them diagnostically relevant.

[1014] In this study, the ability of IL6R202 and IL6R203 to block in vivo IL-6 induced responses was examined in primates.

[1015] Adult cynomolgus monkeys (Macaca fascicularis), aged between 3 and 4 years and weighing below 3 kg were housed individually in an environment controlled room, at room temperature. The body weight of all individuals was recorded at first administration and weekly from there on. The animals were numbered and coupled in groups of 2 individuals (one male and one female) with approximately equal mean body weight.

[1016] The lyophilized hIL-6 (Gentaur) was dissolved in 0.5 M acetic acid to a final concentration of 100 μg/mL. One vial containing 500 μs IL-6 was dissolved in 5 mL 0.5 M acetic acid. First, 3 ml, of 0.5 M acetic acid was added to the vial and the solution was swirled until all lyophilisate was dissolved. The solution was transferred to a sterile polystyrene tube. The vial was rinsed with 2 mL of 0.5 M acetic acid and this solution was transferred to the polystyrene tube as well, with subsequent gentle mixing of the solution.

[1017] Human IL-6 was administered via an s.c. bolus injection of 1 mL/kg b.w. in 1% autologues Cynomolgus monkey heat inactivated serum in the dorsal region.

[1018] 8 groups (group 4 to 11, Table C-31) of animals received a single i.v. injection of IL6R202 or IL6R203, in one of four different dosages; namely 0.6, 2, 6 or 20 mg/kg b.w. in D-PBS. The Nanobodies® were administered via an i.v. bolus injection of 1 mL/kg b.w. in D-PBS into the vena cephalica of the left or right arm. Subsequently after 1 hour, all animals were injected with the first of 7 daily injections s.c. of hIL-6 (5 μg/kg b.w.). Two individuals of one group (group 12, 23m and 24f, Table C-31) received no Nanobody® preadministration and served as a negative control.

[1019] Blood samples were collected prior to injection on test day 0 and from there on daily from test day 1 to test clay 14 and on day 21.

[1020] The inflammation parameter CRP (serum C-reactive protein levels) is one of the most important parameters for evaluating efficacy with respect to acute phase response in this animal model (animal model that was used in the current study is described in detail in Asano et al. (1990) Blood 8, 1602-1605). Furthermore, CRP is also one of the most important non-subjective parameters used in evaluating efficacy of anti-inflammatory response compounds in human subjects as part of clinical trials, which is well documented in the following references: Choy et al. (2002) Arthritis and Rheumatism 46 (12) 3143-50; Nishimoto et al. (2004) Arthritis and Rheumatism 50 (6) 1761-69; Maini et al. (2006) Arthritis and Rheumatism 54 (9) 2817-29. An increase in the levels of CRP is one of the most relevant indications of inflammation.

[1021] In the current animal model, the CRP levels and a number of other parameters were measured (results for the latter not shown); the inflammation parameter ESR (erythrocyte sedimentation rate) could not be determined in a quantitative manner (i.e. to provide a dose-response curve) using this model.

TABLE C-31
Chronologic schedule of hIL-6 and test item administration

| Animal | Animal number | | Nanobody ® | | | | hIL6 | |
|---|---|---|---|---|---|---|---|---|
| group | Male | Female | Test item | Admin (day) | dose | | Admin (day) | dose |
| 4 | 7 | 8 | IL6R202 | 1 | 0.6 | mg/kg b.w. | 1, 2, 3, 4, | 5 μg/kg b.w. |
| | | | | | | | 5, 6, 7 | |
| 5 | 9 | 10 | IL6R202 | 1 | 2 | mg/kg b.w. | 1, 2, 3, 4, | 5 μg/kg b.w. |
| | | | | | | | 5, 6, 7 | |
| 6 | 11 | 12 | IL6R202 | 1 | 6 | mg/kg b.w. | 1, 2, 3, 4, | 5 μg/kg b.w. |
| | | | | | | | 5, 6, 7 | |
| 7 | 13 | 14 | IL6R202 | 1 | 20 | mg/kg b.w. | 1, 2, 3, 4, | 5 μg/kg b.w. |
| | | | | | | | 5, 6, 7 | |
| 8 | 15 | 16 | IL6R203 | 1 | 0.6 | mg/kg b.w. | 1, 2, 3, 4, | 5 μg/kg b.w. |
| | | | | | | | 5, 6, 7 | |
| 9 | 17 | 18 | IL6R203 | 1 | 2 | mg/kg b.w. | 1, 2, 3, 4, | 5 μg/kg b.w. |
| | | | | | | | 5, 6, 7 | |
| 10 | 19 | 20 | IL6R203 | 1 | 6 | mg/kg b.w. | 1, 2, 3, 4, | 5 μg/kg b.w. |
| | | | | | | | 5, 6, 7 | |
| 11 | 21 | 22 | IL6R203 | 1 | 20 | mg/kg b.w. | 1, 2, 3, 4, | 5 μg/kg b.w. |
| | | | | | | | 5, 6, 7 | |

| | | | | | | | |
|---|---|---|---|---|---|---|---|
| 12 | 23 | 24 | — | — | — | 1, 2, 3, 4, | 5 μg/kg b.w. |
| | | | | | | 5, 6, 7 | |

[1022] Data on the level of CRP are presented in FIG. 42. At test day 2, the serum concentration of CRP in all groups, control and test, reached a maximum of up to 13 times the base level. A clear correlation between the administered dosage of either Nanobody® and the level of increase in CRP was observed.

### Example 29

### Competition ELISA with Reference IgG

[1023] To analyze epitope specificity of a panel of Nanobodies in comparison with the Reference IgG, an ELISA experiment was designed where the Reference IgG MRA was coated, and a dilution series of Nanobodies pre-incubated with a constant amount of IL6R was subsequently transferred to the wells.

[1024] Detection was performed using biotinylated anti-IL6R Mab M182 (Pharmingen) and streptavidin-HRP. Data indicate that only for Reference Fab, IL6R-03, IL6R65, IL6R13 and IL6R88a competitive binding to the Reference IgG was observed.

[1025] Data are presented in FIGS. 43, 44 and 45.

### Example 30

### Biacore Reference-Fab

[1026] To analyze epitope specificity of a panel of Nanobodies in comparison with the Reference-Fab, a Biacore experiment was designed where BN12, a non-neutralizing anti-human IL6R Mab (Diaclone) was coupled to the chip in Sodium acetate pH=4. Next, 100 nM IL-6R was injected on the chip. Then, 100 nM of an anti-IL-6R nanobody was injected. Finally, a mixture of 100 nM Reference-Fab and 100 nM Nanobody was injected.

[1027] Results (FIG. 46) showed that, for all Nanobodies tested, the Reference-Fab was still binding to IL-6R when IL-6R was already bound by the Nanobodies. This indicated that the anti-IL-6R Nanobodies possibly recognized a different epitope on IL-6R. Only for Nanobodies IL6R-03, IL6R65, IL6R06, IL6R13 and IL6R88a reduced binding was observed.

### Example 31

### Potency to Inhibit Binding of Human IL6 to Human, Rhesus and Cynomolgus Monkey Soluble IL6R from Plasma

[1028] Potency to inhibit the binding of human IL6 to human, rhesus and cynomolgus monkey soluble IL6R present in plasma was analyzed for a panel of Nanobodies. A non-neutralizing anti-IL6R Mab BN12 (Diaclone) was coated on a microtiter well plate. Subsequently, plasma from human, rhesus or cynomolgus monkey pre-incubated with human IL6 and a dilution series of Nanobody was applied to the plate. Detection was performed using anti-IL6-biotine followed by streptavidin-HRP reagent. Data are presented in FIGS. 47, 48, 49 and 50.

### Reference Example 1

### Preparation of Reference Fab and IgG According to EP 0 628 639 (=WO 92/19759)

[1029] Two representative anti-human IL-6R immunoglobulins according to EP 0 628 639 (a Fab fragment and a full-sized IgG) were generated and used as reference compounds herein.

[1030] The Fab fragment and full-sized IgG were constructed based on the L-chain called “RV_{L}a” (see EP 0 628 639 B1, Table 2, version (a)) and the H-chain called “RV_{H}f” (see EP 0 628 639 B1, Table 3, version (f)). These particular L-chain and H-chain were chosen for the purposes of constructing the reference compounds because, according to EP 0 268 639 B1 (see for example paragraph [0074]), a reshaped human antibody comprising said L-chain and said H-chain exhibited an ability to bind to human IL-6R at the same level as PM1, a mouse monoclonal antibody against human IL-6R (see again EP 0 628 639 B1, paragraph [009] and the further references cited therein).

[1031] The full-length reference IgG consisted of the amino acid sequences of SEQ ID NO: 629 (heavy chain) and SEQ ID NO: 630 (light chain). The Fab fragment consisted of the amino acid sequences of SEQ ID NO: 631 (heavy chain regions V_{L}b and V_{H}f fused to the CH1 region of human IgG1) and SEQ ID NO: 632 (reshaped human PM-1 variable light chain fused to human Ckappa).

[1032] Encoding DNA fragments were generated by assembly PCR using partially overlapping oligonucleotides. PCR products were cloned into a single, bi-cistronic vector which enables expression of functional, disulphide-linked Fab fragments in the periplasm of E. coli. Full-length IgG was produced in CHO cells transfected with 2 expression vectors containing the genes for the light and heavy chains. The gene encoding the heavy chain was created by fusing V_{H}f to the constant region of human IgG1. The light chain was as described in EP 0 268 639.

TABLE B-1
Nanobodies and polypeptides against the IL-6 receptor.

Nanobodies against the IL-6 receptor
< > PMP40C9(t), SEQ ID NO: 399; PRT; ->
EVQLVESGGGLVQPGGSLRLSCAASGFSLDYYAIGWFRQAPGKEREGVSCM
DSSAGTTSTYYSDSVKGRFTISRDDAKNTVYLQMNSLKPEDTAVYYCAADGHLNW
GQRYVPCSQISWRGWNDYWGQGTQVTVSS
< > PMP34F8(t), SEQ ID NO: 400; PRT; ->
EVQLVESGGGLVQPGGSLRLSCAASGFSLDYYAIGWFRQAPGKEREGVSCM
DSSDGTTNTYYSDSVKGRFTISRDDAKNTVYLQMNSLKPEDTASYYCAADGHLNW
GQPYVPCSQISWRGWNDYWGQGTQVTVSS
< > PMP34E9(t), SEQ ID NO: 401; PRT; ->
EVQLVESGGGLVQPGGSLRLSCAASGFTLDYYAIGWFRQAPGKEREGVSCISS
SDGSTYYADSVKGRFTISRDNAKNTVYLQMNSLKPEDTAAYYCATDRSVYYCSGDA
PEEYYWGQGTQVTVSS
< > PMP34D2(t), SEQ ID NO: 402; PRT; ->
EVQLVESGGGLVQPGGSLRLSCAASGFTLDYFAIGWFRQAPGKERERVSCISS
SDGSTYYADSVKGRFTISRDNAKNTVYLQMNSLKPEDTAVYYCATDRSVYYCSGGA
PEEYYWGQGTQVTVSS
< > PMP34C3(t), SEQ ID NO: 403; PRT; ->
EVQLVESGGGLVQPGGSLRLSCVASGFSLDYYVIGWFRQAPGKEREGVSCISS
SDGSTYYADSVKGRFTISRDNAKNTVYLQMNSLKPEDTAVYYCAADLLRTPEFCVD
SAPYDYWGRGTQVTVSS
< > PMP34A5(t), SEQ ID NO: 404; PRT; ->
EVQLVESGGGLVQPGGSLRLSCAASGFTLGYFAIGWFRQAPGKEREGVSCISS
SDGSTYYADSVKGRFTVSRDNAKNTVYLQMNSLKPEDTAVYYCATDRSVYYCSGG
APEEYYWGQGTQVTVSS
< > PMP33G3(t), SEQ ID NO: 405; PRT; ->
EVQLVESGGGLVQPGGSLRLSCAASGFTLGYFAIGWFRQAPGKEREGVSCISS
SDGSAYYADSVKGRFTVSRDNAKNTVYLQMNSLKPEDTAVYYCATDRSVYYCSGG
APEEYYWGQGTQVTVSS
< > PMP33C10(t), SEQ ID NO: 406; PRT; ->
EVQLVESGGGLVQPGGSLRLSCAASGFTFDDYGMSWVRQAPGKGLEWVSAI
SWNGGSTYYTESMKGRFTISRDNAKNTVYLQMNSLKPEDTAVYYCVKGSTAIVGVP
PTYPDEYDYWGQGTQVTVSS
< > PMP33A2(t), SEQ ID NO: 407; PRT; ->
EVQLVESGGGLVQPGGSLRLSCAASGFSLDYYAIGWFRQAPGKEREGVSCM
DSSGGTTSTYYSDSVKGRFTISRDDAKNTVYLQMNSLKPEDTAVYYCAADGHLNW
GQRYVPCSQISWRGWNDYWGQGTQVTVSS
< > PMP32H5(t), SEQ ID NO: 408; PRT; ->
EVQLVESGGGLVQPGGSLRLSCAASGFTFGSYDMSWVRQAPGKGPEWVSAI
NSGGGSTYYADSVKGRFTISRDNAKNTLYLQMNSLKPEDTAVYYCATDWRYSDYD
LPLPPPGDYWGQGTQVTVSS
< > PMP32F10(t), SEQ ID NO: 409; PRT; ->
EVQLVESGGGLVQAGGSLRLSCAASGFTFDDYAIGWFRQAPGKEREGISCISS
SDGSTYYADSVKGRFTISSDNAKNTVYLQMNSLKPEDTAVYYCAAEPPDSSWILDGS
PEFFKFWGQGTQVTVSS
< > PMP31F4(t), SEQ ID NO: 410; PRT; ->
EVQLVESGGGLVQPGGSLRLSCAASGFTFGSYDMSWVRQAPGKGPEWVSAI
NSGGGSTYYADSVKGRFTISRDNAKNTLYLQMNSLKPEDTAVYYCATDWRYSDYD
LPLPPPGDYWGQGTQVTVSS
< > PMP31D2(t), SEQ ID NO: 411; PRT; ->
EVQLVESGGGLVQAGGSLRLSCAASGFTFDDYAIGWFRQAPGKEREGVSGIS
SSDGNTYYADSVKGRFTISSDNAKNTVYLQMNSLKPEDTAVYYCAAEPPDSNWYLD
GSPEFFKFWGQGTQVTVSS
< > PMP31C8(t), SEQ ID NO: 412; PRT; ->
EVQLVESGGGLVQPGGSLRLSCAASGFTFGSYDMSWVRQAPGKGPEWVSAI
NSGGGSTYYADSVKGRFTISRDNAKNTLYLQMNSLKPEDTAVYYCATDWRYSDYD
LPLPPPGDYWGQGTQVTVSS
< > PMP31C5(t), SEQ ID NO: 413; PRT; ->
EVQLVESGGGLVQAGGSLRLSCAASGFTFDDYAIGWFRQAPGKEREGVSCIS
SSDGSTYYADSVKGRFTISSDNAKNTVYLLMNSLKPEDTAVYYCAAEPPDSMWSLD
GSPEFFKFWGQGTQVTVSS
< > PMP31B4(t), SEQ ID NO: 414; PRT; ->
EVQLVESGGGLVQPGGSLRLSCAASGFTFGSYDMSWVRQAPGKGPEWVSAI
NSGGGSTYYADSVKGRFTISRDNAKNTLYLQMNSLKPEDTAVYYCATDWRYSDYD
LPLPPPGDYWGQGTQVTVSS
< > PMP31B11(t), SEQ ID NO: 415; PRT; ->
EVQLVESGGGLVQPGGSLRLSCAASGFTFGSYDMSWVRQAPGKGPEWVSAI
NSGGGSTYYADSVKGRFTISRDNAKNTLYLQMNSLKPEDTAVYYCATDWRYSDYD
LPLPPPGDYWGQGTQVTVSS
< > PMP30G11(t), SEQ ID NO: 416; PRT; ->
EVQLVESGGGLVQPGGSLRLSCVASGFSLDYYVIGWFRQAPGKEREGVSCISS
SDGSTYYADSVKGRFTISRDNAKNTVYLQMNSLKPEDTAVYYCAADLLRTPEFCVD
SAPYDYWGQGTQVTVSS
< > PMP30B6(t), SEQ ID NO: 417; PRT; ->
EVQLVESGGGLVQPGGSLRLSCAASGFTLDYYVIGWFRQAPGKEREAVACIS
SSDRSTYYADSVKGRFTISRDNAKNTGYLQMNSLKPEDTAVYYCAADLLRTPEFCSD
SAPYDYWGQGTQVTVSS
< > PMP30B1(t), SEQ ID NO: 418; PRT; ->
EVQLVESGGGLVQPGGSLRLSCAASGFTLDYYAIGWWRQAPGKGREGVSCIS
SGDGSTNYADSVKGRFTISRDNAKNTVYLQMNSLKPEDTAVYYCATDRSVYYCSGG
APEEYYWGQGTQVTVSS
< > PMP30A2(t), SEQ ID NO: 419; PRT; ->
EVQLVESGGGLVQPGGSLRLSCAASGFTLDYYVIGWFRQAPGKEREGVSCIG
SSDDSTYYADSVKGRFTISRDNAKNTVYLQMNSLKPEDTAVYYCAADLLRTPEFCT
DSAPYDYWGQGTQVTVSS
< > PMP30A10(t), SEQ ID NO: 420; PRT; ->
EVQLVESGGGLVQPGGSLRLSCAASGFTFDDYGMSWVRQAPGKGLEWVSAI
SWNGGSTYYTESMKGRFTISRDNAKNTVYLQMNSLKPEDTAVYYCVKGSTAIVGVP
PTYPDEYDYWGQGTQVTVSS
< > PMP28H6(t), SEQ ID NO: 421; PRT; ->
EVQLVESGGGLVQPGGSLRLSCAASGFTFGSYDMSWVRQAPGKGPEWVSAI
NSGGGSTYYADSVKGRFTISRDNAKNTLYLQMNSLKPEDTAVYYCATDWRYSDYD
LPLPPPGDYWGQGTQVTVSS
< > PMP28F7(t), SEQ ID NO: 422; PRT; ->
EVQLVESGGGLVQPGGSLRLSCAASGFTFGSYDMSWVRQAPGKGPEWVSAI
NSGGGSTYYADSVKGRFTISRDNAKNTLYLQMNSLKPEDTAVYYCATDWRYSDYD
LPLPPPGDYWGQGTQVTVSS
< > PMP28D4(t), SEQ ID NO: 423; PRT; ->
EVQLVESGGGLVQPGGSLRLSCAASGFTFGSYDMSWVRQAPGKGPEWVSAI
NSGGGSTYYADSVKGRFTISRDNAKNTLYLQMNSLKPEDTAVYYCATDWRYSDYD
LPLPPPGDYWGQGTQVTVSS
< > PMP28C7(t), SEQ ID NO: 424; PRT; ->
EVQLVESGGGLVQPGGSLRLSCAASGFTFGSYDMSWVRQAPGKGPEWVSAI
NSGGDNTYYADSVKGRFTISRDNAKNTLYLQMNSLKPEDTAVYYCATDWRYSDYD
LPLPPPGDYWGQGTQVTVSS
< > PMP28B1(t), SEQ ID NO: 425; PRT; ->
EVQLVESGGGLVQPGGSLRLSCAASGFTLNYYAIGWFRQAPGKEREGVSCISS
SDGSTYYADSVKGRFTISRDNAKNTFYLQMNSLKPEDTAVYYCAAEGLGDSDSPCG
AAWYNDYWGQGTQVTVSS
< > PMP28A2(t), SEQ ID NO: 426; PRT; ->
EVQLVESGGGLVQPGGSLRLSCAASGFTFGSYDMSWVRQAPGKGPEWVSAI
NSGGGSTYYADSVKGRFTISRDNAKNTLYLQMNSLKPEDTAVYYCATDWRYSDYD
LPLPPPGDYWGQGTQVTVSS
< > PMP40H5, SEQ ID NO: 427; PRT; ->
EVQLVESGGGLVQPGGSLRLSCAASGFSLDYYAIGWFRQAPGKEREGVSCM
DSSSGTTSTYYSDSVKGRFTISRDDAKNTVYLQMNSLKPEDTAVYYCAADGHLNWG
QRYVPCSQISWRGWNDYWGQGTQVTVSS
< >PMP35H4, SEQ ID NO: 428; PRT; ->
EVQLVESGGGLVQPGGSLRLSCAASGFTFDDYGMSWVRQAPGRATEWVSAI
SWNGNNTYYTESMKGRFTISRDNAKNTVYLQMNSLKPEDTAVYYCVKGSTAIVGV
PPTYPDEYDYWGQGTQVTVSS
< >PMP35F4, SEQ ID NO: 429; PRT; ->
EVQLVESGGGLVQAGGSLRLSCAASGRTFSSYDMGWYRQAPGKEREFVAIIT
WNSSTYYADSVKGRFTISRDNAKNTVYLQMNSLKPEDTAIYYCNAQYGLGYAEDY
WGQGTQVTVSS
< >PMP35E11, SEQ ID NO: 430; PRT; ->
EVQLVESGGGLVQAGGSLRLSCAASGFTFDDYAIGWFRQAPGKEHEGVSCIS
SSDGSTYYADSVKGRFTISSDNAKNTVYLQMNSLKPEDTAVYYCAAERDVPARSLC
GSYYWYDYRGQGTQVTVSS
< >PMP35C10, SEQ ID NO: 431; PRT; ->
EVQLVESGGGLVQAGGSLRLSCAASGRTFSSYDMGWYRQAPGKEREFVAVI
HWSSGSTYYADPVKGRFTISRDNAKNTVYLQMNSLKPEDTAIYYCNAFLPGPEGFH
DYWGQGTQVTVSS
< >PMP34G9, SEQ ID NO: 432; PRT; ->
EVQLVESGGGLVQAGGSLRLSCAASGRTSSSYDMTWYRQVPGKEREFVAVIS
WSGGSTYYADSVKGRFTISRDNAKNTVYLQMNSLKPEDTAIYYCNAYTGGGDDYW
GQGTQVTVSS
< >PMP34G3, SEQ ID NO: 433; PRT; ->
EVQLVESGGGLVQPGGSLRLSCAASGFTLDYYAIGWFRQAPGKERERVSCISS
SDGSTYYADSVKGRFTISRDNAKNTVYLQMNSLKPEDTAAYYCATDRSVYYCSGGA
PEEYYWGQGTQVTVSS
< >PMP34E10, SEQ ID NO: 434; PRT; ->
EVQLVESGGGLVQAGGSLRLSCAASGRTFSSYAMGWGRQAPGKEREFVATIS
WSGGSTYYADSVKGRFTISRDNAKNTVYLQMNSLKPEDTAVYYCAADLAEFKYSD
YADYWGQGTQVTVSS
< >PMP34C11, SEQ ID NO: 435; PRT; ->
EVQLVESGGGLVQPGGSLRLSCAAAGFTLDYSAIGWFRQAPGKEREMFSCIS
GSDGSTWYADSVAGRFTISFDNAKNTVYLQMNSLKPEDTGLYICAVTGGVRGPCAY
EYEYWGQGTQVTVSS
< >PMP34A12, SEQ ID NO: 436; PRT; ->
EVQLVESGGGLVQPGGSLRLSCVASGFSLDYYVIGWFRQAPGKEREGVSCISS
SDGSTYYADSVKGRFTISRDNAKNTVYLQMNSLKPEDTAVYYCAADLLRTPEFCVD
SAPYDYWGQGTQVTVSS
< >PMP33A3, SEQ ID NO: 437; PRT; ->
EVQLVESGGGLVQPGGSLRLSCAASGFTLDYGAIGWFRQAPGKEREGVSCISS
STGSTYYADSVKGRFTISRDNGKNTVYLQMNSLKPEDTAVYYCAADKMWSPCLVA
ANEEALFEYDYWGQGTQVTVSS
< >PMP32E2, SEQ ID NO: 438; PRT; ->
EVQLVESGGGLVQAGGSLRLSCAASGNIFDDNTMGWTWNRQPPGKQRELVA
IIATDGSTNYADSVKGRFTISRDNAKNTVYLQMNSLKPEDTAVYYCNLFSLRLGRDY
WGQGTQVTVSS
< >PMP32E10, SEQ ID NO: 439; PRT; ->
EVQLVESGGGLVQPGGSLRLSCAASGFTFGSYDMSWVRQAPGKGPEWVSAI
NSGGGSTYYADSVKGRFTISRDNAKNTLYLQMNSLKPEDTAVYYCATDWRYSDYD
LPLPPPGDYWGQGTQVTVSS
< >PMP32C9, SEQ ID NO: 440; PRT; ->
EVQLVESGGGLVQAGGSLRLSCAASGFTFDDYDIGWFRQAPGKEREGVSGIS
SSDGNTYYADSVKGRFTISSDNAKNTVYLQMNSLKPEDTAVYYCAAEPPDSSWYLD
GSPEFFKYWGQGTQVTVSS
< >PMP31A4, SEQ ID NO: 441; PRT; ->
EVQLVESGGGLVQAGGSLRLSCAASGSIFKVNAMGWYRQAPGKQRELVAGII
SGGSTNYADSVKGRLTISRDNAKNTVYLQMNSLKPEDTAVYYCSFVTTNSDYDLGR
DYWGQGTQVTVSS
< >PMP30C11, SEQ ID NO: 442; PRT; ->
EVQLVESGGGLVQAGGSLRLSCAASGRTFSSYDMGWYRQAPGKEREFVAVI
SRSGSSTYYADSVKGRFTISRDNAKNTVYLQMNSLKPEDTAIYYCKAEVVAGDYDY
WGQGTQVTVSS
< >PMP28G3, SEQ ID NO: 443; PRT; ->
EVQLVESGGGLVQAGGSLRLSCTASGNIFSTETMGWYRQPPGKQRDVVATIT
HGGTTNYADSVKGRFTISRDNRKNTVYLQMNSLKPEDTGVYYCNARSSWYSPEYW
GQGTQVTVSS
< >PMP28E11, SEQ ID NO: 444; PRT; ->
EVQLVESGGGFVQAGGSLRLSCIASGDNFSINRMGWYRQALGKQRELVAIIT
NHGSTNYADAVKGRFTISRDYAKNTVYLQMNGLKPDDTAVYYCNAYISEVGTWRD
DYWGQGIQVTVSS
< > 059B.IL6-R.cl5.7(t), SEQ ID NO: 445; PRT; ->
EVQLVESGGGLVQAGGSLRLSCAASGRTFSGADAGWNRQTPGKEREFVAAI
NWSGNSTYYADSVKGRFTVSRDNAKNTVYLQMNSLKPEDTAVYYCHAFRDDYYSE
GKGTLVTVSS
< > 059A.IL6-Rcl4(t), SEQ ID NO: 446; PRT; ->
EVQLVESGGGLVQAGGSLRLSCAASGRTLSSYDMGWYRQGPGKEREFVAAI
SWSGGGTDYVDSVKGRFTISRDTAKNTMYLQMNSLKPEDTAIYYCNALGTTDSDYE
GELYWGQGTQVTVSS
< > 059A.IL6-Rcl3(t), SEQ ID NO: 447; PRT; ->
EVQLVESGGGLVQPGGSLRLSCAASGFTLDSYAIGWFRQAPGKEPEGVSCIST
SDGSTYYADSVKGRFTISRDNAKNTVYLQMNSLKPEDTAVYYCTADGGPHAPLTVQ
DMCVMAIADYWGQGTQVTVSS
< > 059A.IL6-Rcl2(t), SEQ ID NO: 448; PRT; ->
EVQLVESGGGLVQAGGSLRSCAASGRTFSNIAMGWIREAPGKEREFVAALT
WSGGSTYYADSVKGRFTISRDSAKNTVYLQMNKLKPEDTAVYYCVADEEIHLIVSISI
ADFWGQGTQVTVSS
< > 059A.IL6-Rcl1(t), SEQ ID NO: 449; PRT; ->
EVQLVESGGGLVQAGGSLRLSCAASGLTDDDFAIGWFRQAPGKEPEGVSCISS
SDGSTYYADSVKGRFTISSDNAKNTVYLQMNSLKPEDTAVYFCTALFDRCGSTWYY
GMDYWGKGTLVTVSS
Bispecific polypeptides against the IL6 receptor
< >063.IL-6RPMP35C10cl8, SEQ ID NO: 450; PRT; ->
EVQLVESGGGLVQAGGSLRLSCAASGRTFSSYDMGWYRQAPGKEREFVAVI
HWSSGSTYYADPVKGRFTISRDNAKNTVYLQMNSLKPEDTAIYYCNAFLPGPEGFH
DYWGQGTQVTVSSGGGGSGGGSEVQLVESGGGLVQPGNSLRLSCAASGFTFRSFGM
SWVRQAPGKEPEWVSSISGSGSDTLYADSVKGRFTISRDNAKTTLYLQMNSLKPEDT
AVYYCTIGGSLSRSSQGTQVTVSS
< >063.IL-6RPMP34G9cl2, SEQ ID NO: 451; PRT; ->
EVQLVESGGGLVQAGGSLRLSCAASGRTSSSYDMTWYRQVPGKEREFVAVIS
WSGGSTYYADSVKGRFTISRDNAKNTVYLQMNSLKPEDTAIYYCNAYTGGGDDYW
GQGTQVTVSSGGGGSGGGSEVQLVESGGGLVQPGNSLRLSCAASGFTFRSFGMSWV
RQAPGKEPEWVSSISGSGSDTLYADSVKGRFTISRDNAKTTLYLQMNSLKPEDTAVY
YCTIGGSLSRSSQGTQVTVSS
< >063.IL-6RPMP34G3cl4-5, SEQ ID NO: 452; PRT; ->
EVQLVESGGGLVQPGGSLRLSCAASGFTLDYYAIGWFRQAPGKERERVSCISS
SDGSTYYADSVKGRFTISRDNAKNTVYLQMNSLKPEDTAAYYCATDRSVYYCSGGA
PEEYYWGQGTQVTVSSGGGGSGGGSEVQLVESGGGLVQPGNSLRLSCAASGFTFRS
FGMSWVRQAPGKEPEWVSSISGSGSDTLYADSVKGRFTISRDNAKTTLYLQMNSLKP
EDTAVYYCTIGGSLSRSSQGTQVTVSS
< >063.IL-6RPMP34A12cl2, SEQ ID NO: 453; PRT; ->
EVQLVESGGGLVQPGGSLRLSCVASGFSLDYYVIGWFRQAPGKEREGVSCISS
SDGSTYYADSVKGRFTISRDNAKNTVYLQMNSLKPEDTAVYYCAADLLRTPEFCVD
SAPYDYWGQGTQVTVSSGGGGSGGGSEVQLVESGGGLVQPGNSLRLSCAASGFTFR
SFGMSWVRQAPGKEPEWVSSISGSGSDTLYADSVKGRFTISRDNAKTTLYLQMNSLK
PEDTAVYYCTIGGSLSRSSQGTQVTVSS
< >063.IL-6RPMP31A4cl4, SEQ ID NO: 454; PRT; ->
EVQLVESGGGLVQAGGSLRLSCAASGSIFKVNAMGWYRQAPGKQRELVAGII
SGGSTNYADSVKGRLTISRDNAKNTVYLQMNSLKPEDTAVYYCSFVTTNSDYDLGR
DYWGQGTQVTVSSGGGGSGGGSEVQLVESGGGLVQPGNSLRLSCAASGFTFRSFGM
SWVRQAPGKEPEWVSSISGSGSDTLYADSVKGRFTISRDNAKTTLYLQMNSLKPEDT
AVYYCTIGGSLSRSSQGTQVTVSS
< >063.IL-6R.PMP40H5cl4, SEQ ID NO: 455; PRT; ->
EVQLVESGGGLVQPGGSLRLSCAASGFSLDYYAIGWFRQAPGKEREGVSCM
DSSSGTTSTYYSDSVKGRFTISRDDAKNTVYLQMNSLKPEDTAVYYCAADGHLNWG
QRYVPCSQISWRGWNDYWGQGTQVTVSSGGGGSGGGSEVQLVESGGGLVQPGNSL
RLSCAASGFTFRSFGMSWVRQAPGKEPEWVSSISGSGSDTLYADSVKGRFTISRDNA
KTTLYLQMNSLKPEDTAVYYCTIGGSLSRSSQGTQVTVSS
< >063.IL-6R.PMP35F4cl3, SEQ ID NO: 456; PRT; ->
EVQLVESGGGLVQAGGSLRLSCAASGRTFSSYDMGWYRQAPGKEREFVAIIT
WNSSTYYADSVKGRFTISRDNAKNTVYLQMNSLKPEDTAIYYCNAQYGLGYAEDY
WGQGTQVTVSSGGGGSGGGSEVQLVESGGGLVQPGNSLRLSCAASGFTFRSFGMSW
VRQAPGKEPEWVSSISGSGSDTLYADSVKGRFTISRDNAKTTLYLQMNSLKPEDTAV
YYCTIGGSLSRSSQGTQVTVSS
< >063.IL-6R.PMP35E11cl1, SEQ ID NO: 457; PRT; ->
EVQLVESGGGLVQAGGSLRLSCAASGFTFDDYAIGWFRQAPGKEHEGVSCIS
SSDGSTYYADSVKGRFTISSDNAKNTVYLQMNSLKPEDTAVYYCAAERDVPARSLC
GSYYWYDYRGQGTQVTVSSGGGGSGGGSEVQLVESGGGLVQPGNSLRLSCAASGF
TFRSFGMSWYRQAPGKEPEWVSSISGSGSDTLYADSVKGRFTISRDNAKTTLYLQMN
SLKPEDTAVYYCTIGGSLSRSSQGTQVTVSS
< >063.IL-6R.PMP34E10cl3, SEQ ID NO: 458; PRT; ->
EVQLVESGGGLVQAGGSLRLSCAASGRTFSSYAMGWGRQAPGKEREFVATIS
WSGGSTYYADSVKGRFTISRDNAKNTVYLQMNSLKPEDTAVYYCAADLAEFKYSD
YADYWGQGTQVTVSSGGGGSGGGSEVQLVESGGGLVQPGNSLRLSCAASGFTFRSF
GMSWVRQAPGKEPEWVSSISGSGSDTLYADSVKGRFTISRDNAKTTLYLQMNSLKP
EDTAVYYCTIGGSLSRSSQGTQVTVSS
< >063.IL-6R.PMP34C11cl3, SEQ ID NO: 459; PRT; ->
EVQLVESGGGLVQPGGSLRLSCAAAGFTLDYSAIGWFRQAPGKEREMFSCIS
GSDGSTWYADSVAGRFTISFDNAKNTVYLQMNSLKPEDTGLYICAVTGGVRGPCAY
EYEYWGQGTQVTVSSGGGGSGGGSEVQLVESGGGLVQPGNSLRLSCAASGFTFRSF
GMSWVRQAPGKEPEWVSSISGSGSDTLYADSVKGRFTISRDNAKTTLYLQMNSLKP
EDTAVYYCTIGGSLSRSSQGTQVTVSS
< >063.IL-6R.PMP33A3cl1, SEQ ID NO: 460; PRT; ->
EVQLVESGGGLVQPGGSLRLSCAASGFTLDYGAIGWFRQAPGKEREGVSCISS
STGSTYYADSVKGRFTISRDNGKNTVYLQMNSLKPEDTAVYYCAADKMWSPCLVA
ANEEALFEYDYWGQGTQVTVSSGGGGSGGGSEVQLVESGGGLVQPGNSLRLSCAAS
GFTFRSFGMSWVRQAPGKEPEWVSSISGSGSDTLYADSVKGRFTISRDNAKTTLYLQ
MNSLKPEDTAVYYCTIGGSLSRSSQGTQVTVSS
< >063.IL-6R.PMP32E2cl4, SEQ ID NO: 461; PRT; ->
EVQLVESGGGLVQAGGSLRLSCAASGNIFDDNTMGWTWNRQPPGKQRELVA
IIATDGSTNYADSVKGRFTISRDNAKNTVYLQMNSLKPEDTAVYYCNLFSLRLGRDY
WGQGTQVTVSSGGGGSGGGSEVQLVESGGGLVQPGNSLRLSCAASGFTFRSFGMSW
VRQAPGKEPEWVSSISGSGSDTLYADSVKGRFTISRDNAKTTLYLQMNSLKPEDTAV
YYCTIGGSLSRSSQGTQVTVSS
< >063.IL-6R.PMP32E10cl1, SEQ ID NO: 462; PRT; ->
EVQLVESGGGLVQPGGSLRLSCAASGFTFGSYDMSWVRQAPGKGPEWVSAI
NSGGGSTYYADSVKGRFTISRDNAKNTLYLQMNSLKPEDTAVYYCATDWRYSDYD
LPLPPPGDYWGQGTQVTVSSGGGGSGGGSEVQLVESGGGLVQPGNSLRLSCAASGF
TFRSFGMSWVRQAPGKEPEWVSSISGSGSDTLYADSVKGRFTISRDNAKTTLYLQMN
SLKPEDTAVYYCTIGGSLSRSSQGTQVTVSS
< >063.IL-6R.PMP32C9cl2, SEQ ID NO: 463; PRT; ->
EVQLVESGGGLVQAGGSLRLSCAASGFTFDDYDIGWFRQAPGKEREGVSGIS
SSDGNTYYADSVKGRFTISSDNAKNTVYLQMNSLKPEDTAVYYCAAEPPDSSWYLD
GSPEFFKYWGQGTQVTVSSGGGGSGGGSEVQLVESGGGLVQPGNSLRLSCAASGFT
FRSFGMSWVRQAPGKEPEWVSSISGSGSDTLYADSVKGRFTISRDNAKTTLYLQMNS
LKPEDTAVYYCTIGGSLSRSSQGTQVTVSS
< >063.IL-6R.PMP30C11cl2, SEQ ID NO: 464; PRT; ->
EVQLVESGGGLVQAGGSLRLSCAASGRTFSSYDMGWYRQAPGKEREFVAVI
SRSGSSTYYADSVKGRFTISRDNAKNTVYLQMNSLKPEDTAIYYCKAEVVAGDYDY
WGQGTQVTVSSGGGGSGGGSEVQLVESGGGLVQPGNSLRLSCAASGFTFRSFGMSW
VRQAPGKEPEWVSSISGSGSDTLYADSVKGRFTISRDNAKTTLYLQMNSLKPEDTAV
YYCTIGGSLSRSSQGTQVTVSS
< >063.IL-6R.PMP28G3cl3, SEQ ID NO: 465; PRT; ->
EVQLVESGGGLVQAGGSLRLSCTASGNIFSTETMGWYRQPPGKQRDVVATIT
HGGTTNYADSVKGRFTISRDNRKNTVYLQMNSLKPEDTGVYYCNARSSWYSPEYW
GQGTQVTVSSGGGGSGGGSEVQLVESGGGLVQPGNSLRLSCAASGFTFRSFGMSWV
RQAPGKEPEWVSSISGSGSDTLYADSVKGRFTISRDNAKTTLYLQMNSLKPEDTAVY
YCTIGGSLSRSSQGTQVTVSS
< >063.IL-6R.PMP28E11cl4, SEQ ID NO: 466; PRT; ->
EVQLVESGGGFVQAGGSLRLSCIASGDNFSINRMGWYRQALGKQRELVAIIT
NHGSTNYADAVKGRFTISRDYAKNTVYLQMNGLKPDDTAVYYCNAYISEVGTWRD
DYWGQGIQVTVSSGGGGSGGGSEVQLVESGGGLVQPGNSLRLSCAASGFTFRSFGM
SWVRQAPGKEPEWVSSISGSGSDTLYADSVKGRFTISRDNAKTTLYLQMNSLKPEDT
AVYYCTIGGSLSRSSQGTQVTVSS
< > 059B.IL6-R.cl5.7(t), SEQ ID NO: 467; PRT; ->
EVQLVESGGGLVQAGGSLRLSCAASGRTFSGADAGWNRQTPGKEREFVAAI
NWSGNSTYYADSVKGRFTVSRDNAKNTVYLQMNSLKPEDTAVYYCHAFRDDYYSE
GKGTLVTVSSGGGGSGGGSEVQLVESGGGLVQPGNSLRLSCAASGFTFRSFGMSWV
RQAPGKEPEWVSSISGSGSDTLYADSVKGRFTISRDNAKTTLYLQMNSLKPEDTAVY
YCTIGGSLSRSSQGTQVTVSS
< > 059A.IL6-Rcl4(t), SEQ ID NO: 468; PRT; ->
EVQLVESGGGLVQAGGSLRLSCAASGRTLSSYDMGWYRQGPGKEREFVAAI
SWSGGGTDYVDSVKGRFTISRDTAKNTMYLQMNSLKPEDTAIYYCNALGTTDSDYE
GELYWGQGTQVTVSSGGGGSGGGSEVQLVESGGGLVQPGNSLRLSCAASGFTFSSF
GMSWVRQAPGKGLEWVSSISGSGSDTLYADSVKGRFTISRDNAKTTLYLQMNSLRP
EDTAVYYCTIGGSLSRSSQGTLVTVSS
< > 059A.IL6-Rcl3(t), SEQ ID NO: 469; PRT; ->
EVQLVESGGGLVQPGGSLRLSCAASGFTLDSYAIGWFRQAPGKEPEGVSCIST
SDGSTYYADSVKGRFTISRDNAKNTVYLQMNSLKPEDTAVYYCTADGGPHAPLTVQ
DMCVMAIADYWGQGTQVTVSSGGGGSGGGSEVQLVESGGGLVQPGNSLRLSCAAS
GFTFSSFGMSWVRQAPGKGLEWVSSISGSGSDTLYADSVKGRFTISRDNAKTTLYLQ
MNSLRPEDTAVYYCTIGGSLSRSSQGTLVTVSS
< > 059A.IL6-Rcl2(t), SEQ ID NO: 470; PRT; ->
EVQLVESGGGLVQAGGSLRLSCAASGRTFSNIAMGWIREAPGKEREFVAALT
WSGGSTYYADSVKGRFTISRDSAKNTVYLQMNKLKPEDTAVYYCVADEEIHLIVSISI
ADFWGQGTQVTVSSGGGGSGGGSEVQLVESGGGLVQPGNSLRLSCAASGFTFSSFG
MSWVRQAPGKGLEWVSSISGSGSDTLYADSVKGRFTISRDNAKTTLYLQMNSLRPE
DTAVYYCTIGGSLSRSSQGTLVTVSS
< > 059A.IL6-Rcl1(t), SEQ ID NO: 471; PRT; ->
EVQLVESGGGLVQAGGSLRLSCAASGLTDDDFAIGWFRQAPGKEPEGVSCISS
SDGSTYYADSVKGRFTISSDNAKNTVYLQMNSLKPEDTAVYFCTALFDRCGSTWYY
GMDYWGKGTLVTVSSGGGGSGGGSEVQLVESGGGLVQPGNSLRLSCAASGFTFSSF
GMSWVRQAPGKGLEWVSSISGSGSDTLYADSVKGRFTISRDNAKTTLYLQMNSLRP
EDTAVYYCTIGGSLSRSSQGTLVTVSS
Leader sequences and N-terminal sequences
< > llama leader 1, SEQ ID NO: 472; PRT; ->
VKKLLFAIPLVVPFYAAQPAMA
< > llama leader 2, SEQ ID NO: 473; PRT; ->
VKKLLFAIPLVVPFYAAQPAIA
< > llama leader 3, SEQ ID NO: 474; PRT; -> FELASVAQA
< > leader sequence, SEQ ID NO: 475; PRT; ->
MKKTAIAIAVALAGLATVAQA
< > leader sequence, SEQ ID NO: 476; PRT; ->
MKKTAIAFAVALAGLATVAQA
< > N-terminal sequence, SEQ ID NO: 477; PRT; ->
AAAEQKLISEEDLNGAAHHHHHH**
Trivalent bispecific polypeptides directed against the IL-6 receptor and human serum
albumin
< IL6R43, SEQ ID NO: 478“; PRT; ->”
EVQLVESGGGLVQAGGSLRLSCAASGSIFKVNAMGWYRQAPGKQRELVAGII
SGGSTNYADSVKGRLTISRDNAKNTVYLQMNSLKPEDTAVYYCSFVTTNSDYDLGR
DYWGQGTQVTVSSGGGGSGGGSAVQLVESGGGLVQPGNSLRLSCAASGFTFRSFG
MSWVRQAPGKEPEWVSSISGSGSDTLYADSVKGRFTISRDNAKTTLYLQMNSLKPE
DTAVYYCTIGGSLSRSSQGTQVTVSSGGGGSGGGSEVQLVESGGGLVQAGGSLRLSC
AASGSIFKVNAMGWYRQAPGKQRELVAGIISGGSTNYADSVKGRLTISRDNAKNTV
YLQMNSLKPEDTAVYYCSFVTTNSDYDLGRDYWGQGTQVTVSS
< IL6R44, SEQ ID NO: 479“; PRT; ->”
EVQLVESGGGLVQAGGSLRLSCAASGFTFDDYDIGWFRQAPGKEREGVSGIS
SSDGNTYYADSVKGRFTISSDNAKNTVYLQMNSLKPEDTAVYYCAAEPPDSSWYLD
GSPEFFKYWGQGTQVTVSSGGGGSGGGSAVQLVESGGGLVQPGNSLRLSCAASGFT
FRSFGMSWVRQAPGKEPEWVSSISGSGSDTLYADSVKGRFTISRDNAKTTLYLQMNS
LKPEDTAVYYCTIGGSLSRSSQGTQVTVSSGGGGSGGGSEVQLVESGGGLVQAGGSL
RLSCAASGFTFDDYDIGWFRQAPGKEREGVSGISSSDGNTYYADSVKGRFTISSDNA
KNTVYLQMNSLKPEDTAVYYCAAEPPDSSWYLDGSPEFFKYWGQGTQVTVSS
< IL6R49, SEQ ID NO: 480“; PRT; ->”
EVQLVESGGGLVQAGGSLRLSCAASGRTSSSYDMTWYRQVPGKEREFVAVIS
WSGGSTYYADSVKGRFTISRDNAKNTVYLQMNSLKPEDTAIYYCNAYTGGGDDYW
GQGTQVTVSSGGGGSGGGSAVQLVESGGGLVQPGNSLRLSCAASGFTFRSFGMSWV
RQAPGKEPEWVSSISGSGSDTLYADSVKGRFTISRDNAKTTLYLQMNSLKPEDTAVY
YCTIGGSLSRSSQGTQVTVSSGGGGSGGGSEVQLVESGGGLVQAGGSLRLSCAASGR
TSSSYDMTWYRQVPGKEREFVAVISWSGGSTYYADSVKGRFTISRDNAKNTVYLQM
NSLKPEDTAIYYCNAYTGGGDDYWGQGTQVTVSS
< IL6R53, SEQ ID NO: 481“; PRT; ->”
EVQLVESGGGLVQPGGSLRLSCAASGFTFDDYGMSWVRQAPGRATEWVSAI
SWNGNNTYYTESMKGRFTISRDNAKNTVYLQMNSLKPEDTAVYYCVKGSTAIVGV
PPTYPDEYDYWGQGTQVTVSSGGGGSGGGSAVQLVESGGGLVQPGNSLRLSCAASG
FTFRSFGMSWVRQAPGKEPEWVSSISGSGSDTLYADSVKGRFTISRDNAKTTLYLQM
NSLKPEDTAVYYCTIGGSLSRSSQGTQVTVSSGGGGSGGGSEVQLVESGGGLVQPGG
SLRLSCAASGFTFDDYGMSWVRQAPGRATEWVSAISWNGNNTYYTESMKGRFTISR
DNAKNTVYLQMNSLKPEDTAVYYCVKGSTAIVGVPPTYPDEYDYWGQGTQVTVSS
< IL6R54, SEQ ID NO: 482“; PRT; ->”
EVQLVESGGGLVQPGGSLRLSCAASGFSLDYYAIGWFRQAPGKEREGVSCM
DSSSGTTSTYYSDSVKGRFTISRDDAKNTVYLQMNSLKPEDTAVYYCAADGHLNWG
QRYVPCSQISWRGWNDYWGQGTQVTVSSGGGGSGGGSAVQLVESGGGLVQPGNSL
RLSCAASGFTFRSFGMSWVRQAPGKEPEWVSSISGSGSDTLYADSVKGRFTISRDNA
KTTLYLQMNSLKPEDTAVYYCTIGGSLSRSSQGTQVTVSSGGGGSGGGSEVQLVESG
GGLVQPGGSLRLSCAASGFSLDYYAIGWFRQAPGKEREGVSCMDSSSGTTSTYYSDS
VKGRFTISRDDAKNTVYLQMNSLKPEDTAVYYCAADGHLNWGQRYVPCSQISWRG
WNDYWGQGTQVTVSS
< , SEQ ID NO: 483“; PRT; ->”
AVQLVESGGGLVQPGNSLRLSCAASGFTFRSFGMSWVRQAPGKEPEWVSSIS
GSGSDTLYADSVKGRFTISRDNAKTTLYLQMNSLKPEDTAVYYCTIGGSLSRSSQGT
QVTVSSGGGGSGGGSEVQLVESGGGLVQAGGSLRLSCAASGSIFKVNAMGWYRQA
PGKQRELVAGIISGGSTNYADSVKGRLTISRDNAKNTVYLQMNSLKPEDTAVYYCSF
VTTNSDYDLGRDYWGQGTQVTVSSGGGGSGGGSEVQLVESGGGLVQAGGSLRLSC
AASGSIFKVNAMGWYRQAPGKQRELVAGIISGGSTNYADSVKGRLTISRDNAKNTV
YLQMNSLKPEDTAVYYCSFVTTNSDYDLGRDYWGQGTQVTVSS
< , SEQ ID NO: 484“; PRT; ->”
AVQLVESGGGLVQPGNSLRLSCAASGFTFRSFGMSWVRQAPGKEPEWVSSIS
GSGSDTLYADSVKGRFTISRDNAKTTLYLQMNSLKPEDTAVYYCTIGGSLSRSSQGT
QVTVSSGGGGSGGGSEVQLVESGGGLVQAGGSLRLSCAASGFTFDDYDIGWFRQAP
GKEREGVSGISSSDGNTYYADSVKGRFTISSDNAKNTVYLQMNSLKPEDTAVYYCA
AEPPDSSWYLDGSPEFFKYWGQGTQVTVSSGGGGSGGGSEVQLVESGGGLVQAGGS
LRLSCAASGFTFDDYDIGWFRQAPGKEREGVSGISSSDGNTYYADSVKGRFTISSDNA
KNTVYLQMNSLKPEDTAVYYCAAEPPDSSWYLDGSPEFFKYWGQGTQVTVSS
< , SEQ ID NO: 485“; PRT; ->”
AVQLVESGGGLVQPGNSLRLSCAASGFTFRSFGMSWVRQAPGKEPEWVSSIS
GSGSDTLYADSVKGRFTISRDNAKTTLYLQMNSLKPEDTAVYYCTIGGSLSRSSQGT
QVTVSSGGGGSGGGSEVQLVESGGGLVQAGGSLRLSCAASGRTSSSYDMTWYRQV
PGKEREFVAVISWSGGSTYYADSVKGRFTISRDNAKNTVYLQMNSLKPEDTAIYYCN
AYTGGGDDYWGQGTQVTVSSGGGGSGGGSEVQLVESGGGLVQAGGSLRLSCAASG
RTSSSYDMTWYRQVPGKEREFVAVISWSGGSTYYADSVKGRFTISRDNAKNTVYLQ
MNSLKPEDTAIYYCNAYTGGGDDYWGQGTQVTVSS
< , SEQ ID NO: 486“; PRT; ->”
AVQLVESGGGLVQPGNSLRLSCAASGFTFRSFGMSWVRQAPGKEPEWVSSIS
GSGSDTLYADSVKGRFTISRDNAKTTLYLQMNSLKPEDTAVYYCTIGGSLSRSSQGT
QVTVSSGGGGSGGGSEVQLVESGGGLVQPGGSLRLSCAASGFTFDDYGMSWVRQA
PGRATEWVSAISWNGNNTYYTESMKGRFTISRDNAKNTVYLQMNSLKPEDTAVYY
CVKGSTAIVGVPPTYPDEYDYWGQGTQVTVSSGGGGSGGGSEVQLVESGGGLVQPG
GSLRLSCAASGFTFDDYGMSWVRQAPGRATEWVSAISWNGNNTYYTESMKGRFTIS
RDNAKNTVYLQMNSLKPEDTAVYYCVKGSTAIVGVPPTYPDEYDYWGQGTQVTVSS
< , SEQ ID NO: 487“; PRT; ->”
AVQLVESGGGLVQPGNSLRLSCAASGFTFRSFGMSWVRQAPGKEPEWVSSIS
GSGSDTLYADSVKGRFTISRDNAKTTLYLQMNSLKPEDTAVYYCTIGGSLSRSSQGT
QVTVSSGGGGSGGGSEVQLVESGGGLVQPGGSLRLSCAASGFSLDYYAIGWFRQAP
GKEREGVSCMDSSSGTTSTYYSDSVKGRFTISRDDAKNTVYLQMNSLKPEDTAVYY
CAADGHLNWGQRYVPCSQISWRGWNDYWGQGTQVTVSSGGGGSGGGSEVQLVES
GGGLVQPGGSLRLSCAASGFSLDYYAIGWFRQAPGKEREGVSCMDSSSGTTSTYYSD
SVKGRFTISRDDAKNTVYLQMNSLKPEDTAVYYCAADGHLNWGQRYVPCSQISWR
GWNDYWGQGTQVTVSS
< , SEQ ID NO: 488“; PRT; ->”
EVQLVESGGGLVQAGGSLRLSCAASGSIFKVNAMGWYRQAPGKQRELVAGII
SGGSTNYADSVKGRLTISRDNAKNTVYLQMNSLKPEDTAVYYCSFVTTNSDYDLGR
DYWGQGTQVTVSSGGGGSGGGSEVQLVESGGGLVQAGGSLRLSCAASGSIFKVNA
MGWYRQAPGKQRELVAGIISGGSTNYADSVKGRLTISRDNAKNTVYLQMNSLKPED
TAVYYCSFVTTNSDYDLGRDYWGQGTQVTVSSGGGGSGGGSAVQLVESGGGLVQP
GNSLRLSCAASGFTFRSFGMSWVRQAPGKEPEWVSSISGSGSDTLYADSVKGRFTISR
DNAKTTLYLQMNSLKPEDTAVYYCTIGGSLSRSSQGTQVTVSS
< , SEQ ID NO: 489“; PRT; ->”
EVQLVESGGGLVQAGGSLRLSCAASGFTFDDYDIGWFRQAPGKEREGVSGIS
SSDGNTYYADSVKGRFTISSDNAKNTVYLQMNSLKPEDTAVYYCAAEPPDSSWYLD
GSPEFFKYWGQGTQVTVSSGGGGSGGGSEVQLVESGGGLVQAGGSLRLSCAASGFT
FDDYDIGWFRQAPGKEREGVSGISSSDGNTYYADSVKGRFTISSDNAKNTVYLQMNS
LKPEDTAVYYCAAEPPDSSWYLDGSPEFFKYWGQGTQVTVSSGGGGSGGGSAVQL
VESGGGLVQPGNSLRLSCAASGFTFRSFGMSWVRQAPGKEPEWVSSISGSGSDTLYA
DSVKGRFTISRDNAKTTLYLQMNSLKPEDTAVYYCTIGGSLSRSSQGTQVTVSS
< , SEQ ID NO: 490“; PRT; ->”
EVQLVESGGGLVQAGGSLRLSCAASGRTSSSYDMTWYRQVPGKEREFVAVIS
WSGGSTYYADSVKGRFTISRDNAKNTVYLQMNSLKPEDTAIYYCNAYTGGGDDYW
GQGTQVTVSSGGGGSGGGSEVQLVESGGGLVQAGGSLRLSCAASGRTSSSYDMTW
YRQVPGKEREFVAVISWSGGSTYYADSVKGRFTISRDNAKNTVYLQMNSLKPEDTAI
YYCNAYTGGGDDYWGQGTQVTVSSGGGGSGGGSAVQLVESGGGLVQPGNSLRLSC
AASGFTFRSFGMSWVRQAPGKEPEWVSSISGSGSDTLYADSVKGRFTISRDNAKTTL
YLQMNSLKPEDTAVYYCTIGGSLSRSSQGTQVTVSS
< , SEQ ID NO: 491“; PRT; ->”
EVQLVESGGGLVQPGGSLRLSCAASGFTFDDYGMSWVRQAPGRATEWVSAI
SWNGNNTYYTESMKGRFTISRDNAKNTVYLQMNSLKPEDTAVYYCVKGSTAIVGV
PPTYPDEYDYWGQGTQVTVSSGGGGSGGGSEVQLVESGGGLVQPGGSLRLSCAASG
FTFDDYGMSWVRQAPGRATEWVSAISWNGNNTYYTESMKGRFTISRDNAKNTVYL
QMNSLKPEDTAVYYCVKGSTAIVGVPPTYPDEYDYWGQGTQVTVSSGGGGSGGGS
AVQLVESGGGLVQPGNSLRLSCAASGFTFRSFGMSWVRQAPGKEPEWVSSISGSGSD
TLYADSVKGRFTISRDNAKTTLYLQMNSLKPEDTAVYYCTIGGSLSRSSQGTQVTVS
S
< , SEQ ID NO: 492“; PRT; ->”
EVQLVESGGGLVQPGGSLRLSCAASGFSLDYYAIGWFRQAPGKEREGVSCM
DSSSGTTSTYYSDSVKGRFTISRDDAKNTVYLQMNSLKPEDTAVYYCAADGHLNWG
QRYVPCSQISWRGWNDYWGQGTQVTVSSGGGGSGGGSEVQLVESGGGLVQPGGSL
RLSCAASGFSLDYYAIGWFRQAPGKEREGVSCMDSSSGTTSTYYSDSVKGRFTISRD
DAKNTVYLQMNSLKPEDTAVYYCAADGHLNWGQRYVPCSQISWRGWNDYWGQG
TQVTVSSGGGGSGGGSAVQLVESGGGLVQPGNSLRLSCAASGFTFRSFGMSWVRQA
PGKEPEWVSSISGSGSDTLYADSVKGRFTISRDNAKTTLYLQMNSLKPEDTAVYYCTI
GGSLSRSSQGTQVTVSS
Humanized trivalent bispecific polypeptides directed against the IL-6 receptor and
human serum albumin
< , SEQ ID NO: 493“; PRT; ->”
EVQLVESGGGLVQPGGSLRLSCAASGSIFKVNAMGWYRQAPGKGRELVAGII
SGGSTNYADSVKGRLTISRDNAKNTVYLQMNSLRPEDTAVYYCSFVTTNSDYDLGR
DYWGQGTLVTVSSGGGGSGGGSEVQLVESGGGLVQPGNSLRLSCAASGFTFSSFGM
SWVRQAPGKGLEWVSSISGSGSDTLYADSVKGRFTISRDNAKTTLYLQMNSLRPEDT
AVYYCTIGGSLSRSSQGTLVTVSSGGGGSGGGSEVQLVESGGGLVQPGGSLRLSCAA
SGSIFKVNAMGWYRQAPGKGRELVAGIISGGSTNYADSVKGRLTISRDNAKNTVYL
QMNSLRPEDTAVYYCSFVTTNSDYDLGRDYWGQGTLVTVSS
< , SEQ ID NO: 494“; PRT; ->”
EVQLVESGGGLVQPGGSLRLSCAASGSIFKVNAMGWYRQAPGKGRELVAGII
SGGSTNYADSVKGRFTISRDNAKNTVYLQMNSLRPEDTAVYYCSFVTTNSDYDLGR
DYWGQGTLVTVSSGGGGSGGGSEVQLVESGGGLVQPGNSLRLSCAASGFTFSSFGM
SWVRQAPGKGLEWVSSISGSGSDTLYADSVKGRFTISRDNAKTTLYLQMNSLRPEDT
AVYYCTIGGSLSRSSQGTLVTVSSGGGGSGGGSEVQLVESGGGLVQPGGSLRLSCAA
SGSIFKVNAMGWYRQAPGKGRELVAGIISGGSTNYADSVKGRFTISRDNAKNTVYL
QMNSLRPEDTAVYYCSFVTTNSDYDLGRDYWGQGTLVTVSS
< , SEQ ID NO: 495“; PRT; ->”
EVQLVESGGGLVQPGGSLRLSCAASGSIFKVNAMGWYRQAPGKGRELVAGII
SGGSTNYADSVKGRLTISRDNAKNTLYLQMNSLRPEDTAVYYCSFVTTNSDYDLGR
DYWGQGTLVTVSSGGGGSGGGSEVQLVESGGGLVQPGNSLRLSCAASGFTFSSFGM
SWVRQAPGKGLEWVSSISGSGSDTLYADSVKGRFTISRDNAKTTLYLQMNSLRPEDT
AVYYCTIGGSLSRSSQGTLVTVSSGGGGSGGGSEVQLVESGGGLVQPGGSLRLSCAA
SGSIFKVNAMGWYRQAPGKGRELVAGIISGGSTNYADSVKGRLTISRDNAKNTLYLQ
MNSLRPEDTAVYYCSFVTTNSDYDLGRDYWGQGTLVTVSS
< , SEQ ID NO: 496“; PRT; ->”
EVQLVESGGGLVQPGGSLRLSCAASGSIFKVNAMGWYRQAPGKGRELVAGII
SGGSTNYADSVKGRLTISRDNAKNTVYLQMNSLRPEDTAVYYCAFVTTNSDYDLGR
DYWGQGTLVTVSSGGGGSGGGSEVQLVESGGGLVQPGNSLRLSCAASGFTFSSFGM
SWVRQAPGKGLEWVSSISGSGSDTLYADSVKGRFTISRDNAKTTLYLQMNSLRPEDT
AVYYCTIGGSLSRSSQGTLVTVSSGGGGSGGGSEVQLVESGGGLVQPGGSLRLSCAA
SGSIFKVNAMGWYRQAPGKGRELVAGIISGGSTNYADSVKGRLTISRDNAKNTVYL
QMNSLRPEDTAVYYCAFVTTNSDYDLGRDYWGQGTLVTVSS
< IL6R67, SEQ ID NO: 497“; PRT; ->”
EVQLVESGGGLVQPGGSLRLSCAASGSIFKVNAMGWYRQAPGKGRELVAGII
SGGSTNYADSVKGRFTISRDNAKNTLYLQMNSLRPEDTAVYYCAFVTTNSDYDLGR
DYWGQGTLVTVSSGGGGSGGGSEVQLVESGGGLVQPGNSLRLSCAASGFTFSSFGM
SWVRQAPGKGLEWVSSISGSGSDTLYADSVKGRFTISRDNAKTTLYLQMNSLRPEDT
AVYYCTIGGSLSRSSQGTLVTVSSGGGGSGGGSEVQLVESGGGLVQPGGSLRLSCAA
SGSIFKVNAMGWYRQAPGKGRELVAGIISGGSTNYADSVKGRFTISRDNAKNTLYLQ
MNSLRPEDTAVYYCAFVTTNSDYDLGRDYWGQGTLVTVSS
< , SEQ ID NO: 498“; PRT; ->”
EVQLVESGGGLVQPGGSLRLSCAASGFTFDDYDIGWFRQAPGKGREGVSGIS
SSDGNTYYADSVKGRFTISSDNAKNTVYLQMNSLRPEDTAVYYCAAEPPDSSWYLD
GSPEFFKYWGQGTLVTVSSGGGGSGGGSEVQLVESGGGLVQPGNSLRLSCAASGFTF
SSFGMSWVRQAPGKGLEWVSSISGSGSDTLYADSVKGRFTISRDNAKTTLYLQMNSL
RPEDTAVYYCTIGGSLSRSSQGTLVTVSSGGGGSGGGSEVQLVESGGGLVQPGGSLR
LSCAASGFTFDDYDIGWFRQAPGKGREGVSGISSSDGNTYYADSVKGRFTISSDNAK
NTVYLQMNSLRPEDTAVYYCAAEPPDSSWYLDGSPEFFKYWGQGTLVTVSS
< , SEQ ID NO: 499“; PRT; ->”
EVQLVESGGGLVQPGGSLRLSCAASGFTFSDYDIGWFRQAPGKGREGVSGISS
SDGNTYYADSVKGRFTISSDNAKNTVYLQMNSLRPEDTAVYYCAAEPPDSSWYLDG
SPEFFKYWGQGTLVTVSSGGGGSGGGSEVQLVESGGGLVQPGNSLRLSCAASGFTFS
SFGMSWVRQAPGKGLEWVSSISGSGSDTLYADSVKGRFTISRDNAKTTLYLQMNSL
RPEDTAVYYCTIGGSLSRSSQGTLVTVSSGGGGSGGGSEVQLVESGGGLVQPGGSLR
LSCAASGFTFSDYDIGWFRQAPGKGREGVSGISSSDGNTYYADSVKGRFTISSDNAK
NTVYLQMNSLRPEDTAVYYCAAEPPDSSWYLDGSPEFFKYWGQGTLVTVSS
< , SEQ ID NO: 500“; PRT; ->”
EVQLVESGGGLVQPGGSLRLSCAASGFTFDDYDIGWFRQAPGKGREGVSGIS
SSDGNTYYADSVKGRFTISRDNAKNTVYLQMNSLRPEDTAVYYCAAEPPDSSWYLD
GSPEFFKYWGQGTLVTVSSGGGGSGGGSEVQLVESGGGLVQPGNSLRLSCAASGFTF
SSFGMSWVRQAPGKGLEWVSSISGSGSDTLYADSVKGRFTISRDNAKTTLYLQMNSL
RPEDTAVYYCTIGGSLSRSSQGTLVTVSSGGGGSGGGSEVQLVESGGGLVQPGGSLR
LSCAASGFTFDDYDIGWFRQAPGKGREGVSGISSSDGNTYYADSVKGRFTISRDNAK
NTVYLQMNSLRPEDTAVYYCAAEPPDSSWYLDGSPEFFKYWGQGTLVTVSS
< , SEQ ID NO: 501“; PRT; ->”
EVQLVESGGGLVQPGGSLRLSCAASGFTFDDYDIGWFRQAPGKGREGVSGIS
SSDGNTYYADSVKGRFTISSDNAKNTVYLQMNSLRPEDTAVYYCAAEPPDSSWYLD
GSPEFFKYWGQGTLVTVSSGGGGSGGGSEVQLVESGGGLVQPGNSLRLSCAASGFTF
SSFGMSWVRQAPGKGLEWYSSISGSGSDTLYADSVKGRFTISRDNAKTTLYLQMNSL
RPEDTAVYYCTIGGSLSRSSQGTLVTVSSGGGGSGGGSEVQLVESGGGLVQPGGSLR
LSCAASGFTFDDYDIGWFRQAPGKGREGVSGISSSDGNTYYADSVKGRFTISSDNAK
NTLYLQMNSLRPEDTAVYYCAAEPPDSSWYLDGSPEFFKYWGQGTLVTVSS
< IL6R203, SEQ ID NO: 502“; PRT; ->”
EVQLVESGGGLVQPGGSLRLSCAASGFTFSDYDIGWFRQAPGKGREGVSGISS
SDGNTYYADSVKGRFTISRDNAKNTLYLQMNSLRPEDTAVYYCAAEPPDSSWYLDG
SPEFFKYWGQGTLVTVSSGGGGSGGGSEVQLVESGGGLVQPGNSLRLSCAASGFTFS
SFGMSWVRQAPGKGLEWVSSISGSGSDTLYADSVKGRFTISRDNAKTTLYLQMNSL
RPEDTAVYYCTIGGSLSRSSQGTLVTVSSGGGGSGGGSEVQLVESGGGLVQPGGSLR
LSCAASGFTFSDYDIGWFRQAPGKGREGVSGISSSDGNTYYADSVKGRFTISRDNAK
NTLYLQMNSLRPEDTAVYYCAAEPPDSSWYLDGSPEFFKYWGQGTLVTVSS
< , SEQ ID NO: 503“; PRT; ->”
EVQLVESGGGLVQPGGSLRLSCAASGFTFDDYGMSWVRQAPGRATEWVSAI
SWNGNNTYYTESMKGRFTISRDNAKNTVYLQMNSLRPEDTAVYYCVKGSTAIVGVP
PTYPDEYDYWGQGTLVTVSSGGGGSGGGSEVQLVESGGGLVQPGNSLRLSCAASGF
TFSSFGMSWVRQAPGKGLEWVSSISGSGSDTLYADSVKGRFTISRDNAKTTLYLQMN
SLRPEDTAVYYCTIGGSLSRSSQGTLVTVSSGGGGSGGGSEVQLVESGGGLVQPGGS
LRLSCAASGFTFDDYGMSWVRQAPGRATEWVSAISWNGNNTYYTESMKGRFTISRD
NAKNTVYLQMNSLRPEDTAVYYCVKGSTAIVGVPPTYPDEYDYWGQGTLVTVSS
< , SEQ ID NO: 504“; PRT; ->”
EVQLVESGGGLVQPGGSLRLSCAASGFTFDDYGMSWVRQAPGKGLEWVSAI
SWNGNNTYYTESMKGRFTISRDNAKNTVYLQMNSLRPEDTAVYYCVKGSTAIVGVP
PTYPDEYDYWGQGTLVTVSSGGGGSGGGSEVQLVESGGGLVQPGNSLRLSCAASGF
TFSSFGMSWVRQAPGKGLEWVSSISGSGSDTLYADSVKGRFTISRDNAKTTLYLQMN
SLRPEDTAVYYCTIGGSLSRSSQGTLVTVSSGGGGSGGGSEVQLVESGGGLVQPGGS
LRLSCAASGFTFDDYGMSWVRQAPGKGLEWVSAISWNGNNTYYTESMKGRFTISRD
NAKNTVYLQMNSLRPEDTAVYYCVKGSTAIVGVPPTYPDEYDYWGQGTLVTVSS
< , SEQ ID NO: 505“; PRT; ->”
EVQLVESGGGLVQPGGSLRLSCAASGFTFDDYGMSWVRQAPGRATEWVSAI
SWNGNNTYYTESMKGRFTISRDNAKNTLYLQMNSLRPEDTAVYYCVKGSTAIVGVP
PTYPDEYDYWGQGTLVTVSSGGGGSGGGSEVQLVESGGGLVQPGNSLRLSCAASGF
TFSSFGMSWVRQAPGKGLEWVSSISGSGSDTLYADSVKGRFTISRDNAKTTLYLQMN
SLRPEDTAVYYCTIGGSLSRSSQGTLVTVSSGGGGSGGGSEVQLVESGGGLVQPGGS
LRLSCAASGFTFDDYGMSWVRQAPGRATEWVSAISWNGNNTYYTESMKGRFTISRD
NAKNTLYLQMNSLRPEDTAVYYCVKGSTAIVGVPPTYPDEYDYWGQGTLVTVSS
< , SEQ ID NO: 506“; PRT; ->”
EVQLVESGGGLVQPGGSLRLSCAASGFTFDDYGMSWVRQAPGKGLEWVSAI
SWNGNNTYYTESMKGRFTISRDNAKNTLYLQMNSLRPEDTAVYYCVKGSTAIVGVP
PTYPDEYDYWGQGTLVTVSSGGGGSGGGSEVQLVESGGGLVQPGNSLRLSCAASGF
TFSSFGMSWVRQAPGKGLEWVSSISGSGSDTLYADSVKGRFTISRDNAKTTLYLQMN
SLRPEDTAVYYCTIGGSLSRSSQGTLVTVSSGGGGSGGGSEVQLVESGGGLVQPGGS
LRLSCAASGFTFDDYGMSWVRQAPGKGLEWVSAISWNGNNTYYTESMKGRFTISRD
NAKNTLYLQMNSLRPEDTAVYYCVKGSTAIVGVPPTYPDEYDYWGQGTLVTVSS
< , SEQ ID NO: 507“; PRT; ->”
EVQLVESGGGLVQPGGSLRLSCAASGFTFDDYGMSWVRQAPGRGLEWVSAI
SWNGNNTYYTESMKGRFTISRDNAKNTLYLQMNSLRPEDTAVYYCVKGSTAIVGVP
PTYPDEYDYWGQGTLVTVSSGGGGSGGGSEVQLVESGGGLVQPGNSLRLSCAASGF
TFSSFGMSWVRQAPGKGLEWVSSISGSGSDTLYADSVKGRFTISRDNAKTTLYLQMN
SLRPEDTAVYYCTIGGSLSRSSQGTLVTVSSGGGGSGGGSEVQLVESGGGLVQPGGS
LRLSCAASGFTFDDYGMSWVRQAPGRGLEWVSAISWNGNNTYYTESMKGRFTISRD
NAKNTLYLQMNSLRPEDTAVYYCVKGSTAIVGVPPTYPDEYDYWGQGTLVTVSS
< , SEQ ID NO: 508“; PRT; ->”
EVQLVESGGGLVQPGGSLRLSCAASGFTFDDYGMSWVRQAPGRALEWVSAI
SWNGNNTYYTESMKGRFTISRDNAKNTLYLQMNSLRPEDTAVYYCVKGSTAIVGVP
PTYPDEYDYWGQGTLVTVSSGGGGSGGGSEVQLVESGGGLVQPGNSLRLSCAASGF
TFSSFGMSWVRQAPGKGLEWVSSISGSGSDTLYADSVKGRFTISRDNAKTTLYLQMN
SLRPEDTAVYYCTIGGSLSRSSQGTLVTVSSGGGGSGGGSEVQLVESGGGLVQPGGS
LRLSCAASGFTFDDYGMSWVRQAPGRALEWVSAISWNGNNTYYTESMKGRFTISRD
NAKNTLYLQMNSLRPEDTAVYYCVKGSTAIVGVPPTYPDEYDYWGQGTLVTVSS
< , SEQ ID NO: 509“; PRT; ->”
EVQLVESGGGLVQPGGSLRLSCAASGFTFDDYGMSWVRQAPGKATEWVSAI
SWNGNNTYYTESMKGRFTISRDNAKNTLYLQMNSLRPEDTAVYYCVKGSTAIVGVP
PTYPDEYDYWGQGTLVTVSSGGGGSGGGSEVQLVESGGGLVQPGNSLRLSCAASGF
TFSSFGMSWVRQAPGKGLEWVSSISGSGSDTLYADSVKGRFTISRDNAKTTLYLQMN
SLRPEDTAVYYCTIGGSLSRSSQGTLVTVSSGGGGSGGGSEVQLVESGGGLVQPGGS
LRLSCAASGFTFDDYGMSWVRQAPGKATEWVSAISWNGNNTYYTESMKGRFTISRD
NAKNTLYLQMNSLRPEDTAVYYCVKGSTAIVGVPPTYPDEYDYWGQGTLVTVSS
< IL6R92, SEQ ID NO: 510“; PRT; ->”
EVQLVESGGGLVQPGGSLRLSCAASGFTFDDYGMSWVRQAPGKGTEWVSAI
SWNGNNTYYTESMKGRFTISRDNAKNTLYLQMNSLRPEDTAVYYCVKGSTAIVGVP
PTYPDEYDYWGQGTLVTVSSGGGGSGGGSEVQLVESGGGLVQPGNSLRLSCAASGF
TFSSFGMSWVRQAPGKGLEWVSSISGSGSDTLYADSVKGRFTISRDNAKTTLYLQMN
SLRPEDTAVYYCTIGGSLSRSSQGTLVTVSSGGGGSGGGSEVQLVESGGGLVQPGGS
LRLSCAASGFTFDDYGMSWVRQAPGKGTEWVSAISWNGNNTYYTESMKGRFTISRD
NAKNTLYLQMNSLRPEDTAVYYCVKGSTAIVGVPPTYPDEYDYWGQGTLVTVSS
< , SEQ ID NO: 511“; PRT; ->”
EVQLVESGGGLVQPGGSLRLSCAASGFTFDDYGMSWVRQAPGRGTEWVSAI
SWNGNNTYYTESMKGRFTISRDNAKNTLYLQMNSLRPEDTAVYYCVKGSTAIVGVP
PTYPDEYDYWGQGTLVTVSSGGGGSGGGSEVQLVESGGGLVQPGNSLRLSCAASGF
TFSSFGMSWVRQAPGKGLEWVSSISGSGSDTLYADSVKGRFTISRDNAKTTLYLQMN
SLRPEDTAVYYCTIGGSLSRSSQGTLVTVSSGGGGSGGGSEVQLVESGGGLVQPGGS
LRLSCAASGFTFDDYGMSWVRQAPGRGTEWVSAISWNGNNTYYTESMKGRFTISRD
NAKNTLYLQMNSLRPEDTAVYYCVKGSTAIVGVPPTYPDEYDYWGQGTLVTVSS
< , SEQ ID NO: 512“; PRT; ->”
EVQLVESGGGLVQPGGSLRLSCAASGFTFDDYGMSWVRQAPGKALEWVSAI
SWNGNNTYYTESMKGRFTISRDNAKNTLYLQMNSLRPEDTAVYYCVKGSTAIVGVP
PTYPDEYDYWGQGTLVTVSSGGGGSGGGSEVQLVESGGGLVQPGNSLRLSCAASGF
TFSSFGMSWVRQAPGKGLEWVSSISGSGSDTLYADSVKGRFTISRDNAKTTLYLQMN
SLRPEDTAVYYCTIGGSLSRSSQGTLVTVSSGGGGSGGGSEVQLVESGGGLVQPGGS
LRLSCAASGFTFDDYGMSWVRQAPGKALEWVSAISWNGNNTYYTESMKGRFTISRD
NAKNTLYLQMNSLRPEDTAVYYCVKGSTAIVGVPPTYPDEYDYWGQGTLVTVSS
< , SEQ ID NO: 513“; PRT; ->”
EVQLVESGGGLVQPGGSLRLSCAASGFTFSDYGMSWVRQAPGKGTEWVSAI
SWGNNTYYTESMKGRFTISRDNAKNTLYLQMNSLRPEDTAVYYCVKGSTAIVGVP
PTYPDEYDYWGQGTLVTVSSGGGGSGGGSEVQLVESGGGLVQPGNSLRLSCAASGF
TFSSFGMSWVRQAPGKGLEWVSSISGSGSDTLYADSVKGRFTISRDNAKTTLYLQMN
SLRPEDTAVYYCTIGGSLSRSSQGTLVTVSSGGGGSGGGSEVQLVESGGGLVQPGGS
LRLSCAASGFTFSDYGMSWVRQAPGKGTEWVSAISWNGNNTYYTESMKGRFTISRD
NAKNTLYLQMNSLRPEDTAVYYCVKGSTAIVGVPPTYPDEYDYWGQGTLVTVSS
< , SEQ ID NO: 514“; PRT; ->”
EVQLVESGGGLVQPGGSLRLSCAASGFTFSDYGMSWVRQAPGKGTEWVSAI
SWNGNNTYYTESMKGRFTISRDNAKNTLYLQMNSLRPEDTAVYYCAKGSTAIVGVP
PTYPDEYDYWGQGTLVTVSSGGGGSGGGSEVQLVESGGGLVQPGNSLRLSCAASGF
TFSSFGMSWVRQAPGKGLEWVSSISGSGSDTLYADSVKGRFTISRDNAKTTLYLQMN
SLRPEDTAVYYCTIGGSLSRSSQGTLVTVSSGGGGSGGGSEVQLVESGGGLVQPGGS
LRLSCAASGFTFSDYGMSWVRQAPGKGTEWVSAISWNGNNTYYTESMKGRFTISRD
NAKNTLYLQMNSLRPEDTAVYYCAKGSTAIVGVPPTYPDEYDYWGQGTLVTVSS
< , SEQ ID NO: 515“; PRT; ->”
EVQLVESGGGLVQPGGSLRLSCAASGSIFKVNAMGWYRQAPGKGRELVAGII
SGGSTNYADSVKGRLTISRDNAKNTVYLQMNSLRPEDTAVYYCSFVTTNSDYDLGR
DYWGQGTLVTVSSGGGGSGGGSEVQLVESGGGLVQPGGSLRLSCAASGSIFKVNAM
GWYRQAPGKGRELVAGIISGGSTNYADSVKGRLTISRDNAKNTVYLQMNSLRPEDT
AVYYCSFVTTNSDYDLGRDYWGQGTLVTVSSGGGGSGGGSEVQLVESGGGLVQPG
NSLRLSCAASGFTFSSFGMSWVRQAPGKGLEWVSSISGSGSDTLYADSVKGRFTISR
DNAKTTLYLQMNSLRPEDTAVYYCTIGGSLSRSSQGTLVTVSS
< , SEQ ID NO: 516“; PRT; ->”
EVQLVESGGGLVQPGGSLRLSCAASGSIFKVNAMGWYRQAPGKGRELVAGII
SGGSTNYADSVKGRFTISRDNAKNTVYLQMNSLRPEDTAVYYCSFVTTNSDYDLGR
DYWGQGTLVTVSSGGGGSGGGSEVQLVESGGGLVQPGGSLRLSCAASGSIFKVNAM
GWYRQAPGKGRELVAGIISGGSTNYADSVKGRFTISRDNAKNTVYLQMNSLRPEDT
AVYYCSFVTTNSDYDLGRDYWGQGTLVTVSSGGGGSGGGSEVQLVESGGGLVQPG
NSLRLSCAASGFTFSSFGMSWVRQAPGKGLEWVSSISGSGSDTLYADSVKGRFTISR
DNAKTTLYLQMNSLRPEDTAVYYCTIGGSLSRSSQGTLVTVSS
< , SEQ ID NO: 517“; PRT; ->”
EVQLVESGGGLVQPGGSLRLSCAASGSIFKVNAMGWYRQAPGKGRELVAGII
SGGSTNYADSVKGRLTISRDNAKNTLYLQMNSLRPEDTAVYYCSFVTTNSDYDLGR
DYWGQGTLVTVSSGGGGSGGGSEVQLVESGGGLVQPGGSLRLSCAASGSIFKVNAM
GWYRQAPGKGRELVAGIISGGSTNYADSVKGRLTISRDNAKNTLYLQMNSLRPEDT
AVYYCSFVTTNSDYDLGRDYWGQGTLVTVSSGGGGSGGGSEVQLVESGGGLVQPG
NSLRLSCAASGFTFSSFGMSWVRQAPGKGLEWVSSISGSGSDTLYADSVKGRFTISR
DNAKTTLYLQMNSLRPEDTAVYYCTIGGSLSRSSQGTLVTVSS
< , SEQ ID NO: 518“; PRT; ->”
EVQLVESGGGLVQPGGSLRLSCAASGSIFKVNAMGWYRQAPGKGRELVAGII
SGGSTNYADSVKGRLTISRDNAKNTVYLQMNSLRPEDTAVYYCAFVTTNSDYDLGR
DYWGQGTLVTVSSGGGGSGGGSEVQLVESGGGLVQPGGSLRLSCAASGSIFKVNAM
GWYRQAPGKGRELVAGIISGGSTNYADSVKGRLTISRDNAKNTVYLQMNSLRPEDT
AVYYCAFVTTNSDYDLGRDYWGQGTLVTVSSGGGGSGGGSEVQLVESGGGLVQPG
NSLRLSCAASGFTFSSFGMSWVRQAPGKGLEWVSSISGSGSDTLYADSVKGRFTISR
DNAKTTLYLQMNSLRPEDTAVYYCTIGGSLSRSSQGTLVTVSS
< , SEQ ID NO: 519“; PRT; ->”
EVQLVESGGGLVQPGGSLRLSCAASGSIFKVNAMGWYRQAPGKGRELVAGII
SGGSTNYADSVKGRFTISRDNAKNTLYLQMNSLRPEDTAVYYCAFVTTNSDYDLGR
DYWGQGTLVTVSSGGGGSGGGSEVQLVESGGGLVQPGGSLRLSCAASGSIFKVNAM
GWYRQAPGKGRELVAGIISGGSTNYADSVKGRFTISRDNAKNTLYLQMNSLRPEDT
AVYYCAFVTTNSDYDLGRDYWGQGTLVTVSSGGGGSGGGSEVQLVESGGGLVQPG
NSLRLSCAASGFTFSSFGMSWVRQAPGKGLEWVSSISGSGSDTLYADSVKGRFTISR
DNAKTTLYLQMNSLRPEDTAVYYCTIGGSLSRSSQGTLVTVSS
< , SEQ ID NO: 520“; PRT; ->”
EVQLVESGGGLVQPGGSLRLSCAASGFTFDDYDIGWFRQAPGKGREGVSGIS
SSDGNTYYADSVKGRFTISSDNAKNTVYLQMNSLRPEDTAVYYCAAEPPDSSWYLD
GSPEFFKYWGQGTLVTVSSGGGGSGGGSEVQLVESGGGLVQPGGSLRLSCAASGFTF
DDYDIGWFRQAPGKGREGVSGISSSDGNTYYADSVKGRFTISSDNAKNTVYLQMNS
LRPEDTAVYYCAAEPPDSSWYLDGSPEFFKYWGQGTLVTVSSGGGGSGGGSEVQLV
ESGGGLVQPGNSLRLSCAASGFTFSSFGMSWVRQAPGKGLEWVSSISGSGSDTLYAD
SVKGRFTISRDNAKTTLYLQMNSLRPEDTAVYYCTIGGSLSRSSQGTLVTVSS
< , SEQ ID NO: 521“; PRT; ->”
EVQLVESGGGLVQPGGSLRLSCAASGFTFSDYDIGWFRQAPGKGREGVSGISS
SDGNTYYADSVKGRFTISSDNAKNTVYLQMNSLRPEDTAVYYCAAEPPDSSWYLDG
SPEFFKYWGQGTLVTVSSGGGGSGGGSEVQLVESGGGLVQPGGSLRLSCAASGFTFS
DYDIGWFRQAPGKGREGVSGISSSDGNTYYADSVKGRFTISSDNAKNTVYLQMNSL
RPEDTAVYYCAAEPPDSSWYLDGSPEFFKYWGQGTLVTVSSGGGGSGGGSEVQLVE
SGGGLVQPGNSLRLSCAASGFTFSSFGMSWVRQAPGKGLEWVSSISGSGSDTLYADS
VKGRFTISRDNAKTTLYLQMNSLRPEDTAVYYCTIGGSLSRSSQGTLVTVSS
< , SEQ ID NO: 522“; PRT; ->”
EVQLVESGGGLVQPGGSLRLSCAASGFTFDDYDIGWFRQAPGKGREGVSGIS
SSDGNTYYADSVKGRFTISRDNAKNTVYLQMNSLRPEDTAVYYCAAEPPDSSWYLD
GSPEFFKYWGQGTLVTVSSGGGGSGGGSEVQLVESGGGLVQPGGSLRLSCAASGFTF
DDYDIGWFRQAPGKGREGVSGISSSDGNTYYADSVKGRFTISRDNAKNTVYLQMNS
LRPEDTAVYYCAAEPPDSSWYLDGSPEFFKYWGQGTLVTVSSGGGGSGGGSEVQLV
ESGGGLVQPGNSLRLSCAASGFTFSSFGMSWVRQAPGKGLEWVSSISGSGSDTLYAD
SVKGRFTISRDNAKTTLYLQMNSLRPEDTAVYYCTIGGSLSRSSQGTLVTSS
< , SEQ ID NO: 523“; PRT; ->”
EVQLVESGGGLVQPGGSLRLSCAASGFTFDDYDIGWFRQAPGKGREGVSGIS
SSDGNTYYADSVKGRFTISSDNAKNTLYLQMNSLRPEDTAVYYCAAEPPDSSWYLD
GSPEFFKYWGQGTLVTVSSGGGGSGGGSEVQLVESGGGLVQPGGSLRLSCAASGFTF
DDYDIGWFRQAPGKGREGVSGISSSDGNTYYADSVKGRFTISSDNAKNTLYLQMNS
LRPEDTAVYYCAAEPPDSSWYLDGSPEFFKYWGQGTLVTVSSGGGGSGGGSEVQLV
ESGGGLVQPGNSLRLSCAASGFTFSSFGMSWVRQAPGKGLEWVSSISGSGSDTLYAD
SVKGRFTISRDNAKTTLYLQMNSLRPEDTAVYYCTIGGSLSRSSQGTLVTVSS
< , SEQ ID NO: 524“; PRT; ->”
EVQLVESGGGLVQPGGSLRLSCAASGFTFSDYDIGWFRQAPGKGREGVSGISS
SDGNTYYADSVKGRFTISRDNAKNTLYLQMNSLRPEDTAVYYCAAEPPDSSWYLDG
SPEFFKYWGQGTLVTVSSGGGGSGGGSEVQLVESGGGLVQPGGSLRLSCAASGFTFS
DYDIGWFRQAPGKGREGVSGISSSDGNTYYADSVKGRFTISRDNAKNTLYLQMNSL
RPEDTAVYYCAAEPPDSSWYLDGSPEFFKYWGQGTLVTVSSGGGGSGGGSEVQLVE
SGGGLVQPGNSLRLSCAASGFTFSSFGMSWVRQAPGKGLEWVSSISGSGSDTLYADS
VKGRFTISRDNAKTTLYLQMNSLRPEDTAVYYCTIGGSLSRSSQGTLVTVSS
< , SEQ ID NO: 525“; PRT; ->”
EVQLVESGGGLVQPGGSLRLSCAASGFTFDDYGMSWVRQAPGRATEWVSAI
SWNGNNTYYTESMKGRFTISRDNAKNTVYLQMNSLRPEDTAVYYCVKGSTAIVGVP
PTYPDEYDYWGQGTLVTVSSGGGGSGGGSEVQLVESGGGLVQPGGSLRLSCAASGF
TFDDYGMSWVRQAPGRATEWVSAISWNGNNTYYTESMKGRFTISRDNAKNTVYLQ
MNSLRPEDTAVYYCVKGSTAIVGVPPTYPDEYDYWGQGTLVTVSSGGGGSGGGSEV
QLVESGGGLVQPGNSLRLSCAASGFTFSSFGMSWVRQAPGKGLEWVSSISGSGSDTL
YADSVKGRFTISRDNAKTTLYLQMNSLRPEDTAVYYCTIGGSLSRSSQGTLVTVSS
< , SEQ ID NO: 526“; PRT; ->”
EVQLVESGGGLVQPGGSLRLSCAASGFTFDDYGMSWVRQAPGKGLEWVSAI
SWNGNNTYYTESMKGRFTISRDNAKNTVYLQMNSLRPEDTAVYYCVKGSTAIVGVP
PTYPDEYDYWGQGTLVTVSSGGGGSGGGSEVQLVESGGGLVQPGGSLRLSCAASGF
TFDDYGMSWVRQAPGKGLEWVSAISWNGNNTYYTESMKGRFTISRDNAKNTVYLQ
MNSLRPEDTAVYYCVKGSTAIVGVPPTYPDEYDYWGQGTLVTVSSGGGGSGGGSEV
QLVESGGGLVQPGNSLRLSCAASGFTFSSFGMSWVRQAPGKGLEWVSSISGSGSDTL
YADSVKGRFTISRDNAKTTLYLQMNSLRPEDTAVYYCTIGGSLSRSSQGTLVTVSS
< , SEQ ID NO: 527“; PRT; ->”
EVQLVESGGGLVQPGGSLRLSCAASGFTFDDYGMSWVRQAPGRATEWVSAI
SWNGNNTYYTESMKGRFTISRDNAKNTLYLQMNSLRPEDTAVYYCVKGSTAIVGVP
PTYPDEYDYWGQGTLVTVSSGGGGSGGGSEVQLVESGGGLVQPGGSLRLSCAASGF
TFDDYGMSWVRQAPGRATEWVSAISWNGNNTYYTESMKGRFTISRDNAKNTLYLQ
MNSLRPEDTAVYYCVKGSTAIVGVPPTYPDEYDYWGQGTLVTVSSGGGGSGGGSEV
QLVESGGGLVQPGNSLRLSCAASGFTFSSFGMSWVRQAPGKGLEWVSSISGSGSDTL
YADSVKGRFTISRDNAKTTLYLQMNSLRPEDTAVYYCTIGGSLSRSSQGTLVTVSS
< , SEQ ID NO: 528“; PRT; ->”
EVQLVESGGGLVQPGGSLRLSCAASGFTFDDYGMSWVRQAPGKGLEWVSAI
SWNGNNTYYTESMKGRFTISRDNAKNTLYLQMNSLRPEDTAVYYCVKGSTAIVGVP
PTYPDEYDYWGQGTLVTVSSGGGGSGGGSEVQLVESGGGLVQPGGSLRLSCAASGF
TFDDYGMSWVRQAPGKGLEWVSAISWNGNNTYYTESMKGRFTISRDNAKNTLYLQ
MNSLRPEDTAVYYCVKGSTAIVGVPPTYPDEYDYWGQGTLVTVSSGGGGSGGGSEV
QLVESGGGLVQPGNSLRLSCAASGFTFSSFGMSWVRQAPGKGLEWVSSISGSGSDTL
YADSVKGRFTISRDNAKTTLYLQMNSLRPEDTAVYYCTIGGSLSRSSQGTLVTVSS
< , SEQ ID NO: 529“; PRT; ->”
EVQLVESGGGLVQPGGSLRLSCAASGFTFDDYGMSWVRQAPGRGLEWVSAI
SWNGNNTYYTESMKGRFTISRDNAKNTLYLQMNSLRPEDTAVYYCVKGSTAIVGVP
PTYPDEYDYWGQGTLVTVSSGGGGSGGGSEVQLVESGGGLVQPGGSLRLSCAASGF
TFDDYGMSWVRQAPGRGLEWVSAISWNGNNTYYTESMKGRFTISRDNAKNTLYLQ
MNSLRPEDTAVYYCVKGSTAIVGVPPTYPDEYDYWGQGTLVTVSSGGGGSGGGSEV
QLVESGGGLVQPGNSLRLSCAASGFTFSSFGMSWVRQAPGKGLEWVSSISGSGSDTL
YADSVKGRFTISRDNAKTTLYLQMNSLRPEDTAVYYCTIGGSLSRSSQGTLVTVSS
< , SEQ ID NO: 530“; PRT; ->”
EVQLVESGGGLVQPGGSLRLSCAASGFTFDDYGMSWVRQAPGRALEWVSAI
SWNGNNTYYTESMKGRFTISRDNAKNTLYLQMNSLRPEDTAVYYCVKGSTAIVGVP
PTYPDEYDYWGQGTLVTVSSGGGGSGGGSEVQLVESGGGLVQPGGSLRLSCAASGF
TFDDYGMSWVRQAPGRALEWVSAISWNGNNTYYTESMKGRFTISRDNAKNTLYLQ
MNSLRPEDTAVYYCVKGSTAIVGVPPTYPDEYDYWGQGTLVTVSSGGGGSGGGSEV
QLVESGGGLVQPGNSLRLSCAASGFTFSSFGMSWVRQAPGKGLEWVSSISGSGSDTL
YADSVKGRFTISRDNAKTTLYLQMNSLRPEDTAVYYCTIGGSLSRSSQGTLVTVSS
< , SEQ ID NO: 531“; PRT; ->”
EVQLVESGGGLVQPGGSLRLSCAASGFTFDDYGMSWVRQAPGKATEWVSAI
SWNGNNTYYTESMKGRFTISRDNAKNTLYLQMNSLRPEDTAVYYCVKGSTAIVGVP
PTYPDEYDYWGQGTLVTVSSGGGGSGGGSEVQLVESGGGLVQPGGSLRLSCAASGF
TFDDYGMSWVRQAPGKATEWVSAISWNGNNTYYTESMKGRFTISRDNAKNTLYLQ
MNSLRPEDTAVYYCVKGSTAIVGVPPTYPDEYDYWGQGTLVTVSSGGGGSGGGSEV
QLVESGGGLVQPGNSLRLSCAASGFTFSSFGMSWVRQAPGKGLEWVSSISGSGSDTL
YADSVKGRFTISRDNAKTTLYLQMNSLRPEDTAVYYCTIGGSLSRSSQGTLVTVSS
< , SEQ ID NO: 532“; PRT; ->”
EVQLVESGGGLVQPGGSLRLSCAASGFTFDDYGMSWVRQAPGKGTEWVSAI
SWNGNNTYYTESMKGRFTISRDNAKNTLYLQMNSLRPEDTAVYYCVKGSTAIVGVP
PTYPDEYDYWGQGTLVTVSSGGGGSGGGSEVQLVESGGGLVQPGGSLRLSCAASGF
TFDDYGMSWVRQAPGKGTEWVSAISWNGNNTYYTESMKGRFTISRDNAKNTLYLQ
MNSLRPEDTAVYYCVKGSTAIVGVPPTYPDEYDYWGQGTLVTVSSGGGGSGGGSEV
QLVESGGGLVQPGNSLRLSCAASGFTFSSFGMSWVRQAPGKGLEWVSSISGSGSDTL
YADSVKGRFTISRDNAKTTLYLQMNSLRPEDTAVYYCTIGGSLSRSSQGTLVTVSS
< , SEQ ID NO: 533“; PRT; ->”
EVQLVESGGGLVQPGGSLRLSCAASGFTFDDYGMSWVRQAPGRGTEWVSAI
SWNGNNTYYTESMKGRFTISRDNAKNTLYLQMNSLRPEDTAVYYCVKGSTAIVGVP
PTYPDEYDYWGQGTLVTVSSGGGGSGGGSEVQLVESGGGLVQPGGSLRLSCAASGF
TFDDYGMSWVRQAPGRGTEWVSAISWNGNNTYYTESMKGRFTISRDNAKNTLYLQ
MNSLRPEDTAVYYCVKGSTAIVGVPPTYPDEYDYWGQGTLVTVSSGGGGSGGGSEV
QLVESGGGLVQPGNSLRLSCAASGFTFSSFGMSWVRQAPGKGLEWVSSISGSGSDTL
YADSVKGRFTISRDNAKTTLYLQMNSLRPEDTAVYYCTIGGSLSRSSQGTLVTVSS
< , SEQ ID NO: 534“; PRT; ->”
EVQLVESGGGLVQPGGSLRLSCAASGFTFDDYGMSWVRQAPGKALEWVSAI
SWNGNNTYYTESMKGRFTISRDNAKNTLYLQMNSLRPEDTAVYYCVKGSTAIVGVP
PTYPDEYDYWGQGTLVTVSSGGGGSGGGSEVQLVESGGGLVQPGGSLRLSCAASGF
TFDDYGMSWVRQAPGKALEWVSAISWNGNNTYYTESMKGRFTISRDNAKNTLYLQ
MNSLRPEDTAVYYCVKGSTAIVGVPPTYPDEYDYWGQGTLVTVSSGGGGSGGGSEV
QLVESGGGLVQPGNSLRLSCAASGFTFSSFGMSWVRQAPGKGLEWVSSISGSGSDTL
YADSVKGRFTISRDNAKTTLYLQMNSLRPEDTAVYYCTIGGSLSRSSQGTLVTVSS
< , SEQ ID NO: 535“; PRT; ->”
EVQLVESGGGLVQPGGSLRLSCAASGFTFSDYGMSWVRQAPGKGTEWVSAI
SWNGNNTYYTESMKGRFTISRDNAKNTLYLQMNSLRPEDTAVYYCVKGSTAIVGVP
PTYPDEYDYWGQGTLVTVSSGGGGSGGGSEVQLVESGGGLVQPGGSLRLSCAASGF
TFSDYGMSWVRQAPGKGTEWVSAISWNGNNTYYTESMKGRFTISRDNAKNTLYLQ
MNSLRPEDTAVYYCVKGSTAIVGVPPTYPDEYDYWGQGTLVTVSSGGGGSGGGSEV
QLVESGGGLVQPGNSLRLSCAASGFTFSSFGMSWVRQAPGKGLEWVSSISGSGSDTL
YADSVKGRFTISRDNAKTTLYLQMNSLRPEDTAVYYCTIGGSLSRSSQGTLVTVSS
< SEQ ID NO: 536“; PRT; ->”
EVQLVESGGGLVQPGGSLRLSCAASGFTFSDYGMSWVRQAPGKGTEWVSAI
SWNGNNTYYTESMKGRFTISRDNAKNTLYLQMNSLRPEDTAVYYCAKGSTAIVGVP
PTYPDEYDYWGQGTLVTVSSGGGGSGGGSEVQLVESGGGLVQPGGSLRLSCAASGF
TFSDYGMSWVRQAPGKGTEWVSAISWNGNNTYYTESMKGRFTISRDNAKNTLYLQ
MNSLRPEDTAVYYCAKGSTAIVGVPPTYPDEYDYWGQGTLVTVSSGGGGSGGGSEV
QLVESGGGLVQPGNSLRLSCAASGFTFSSFGMSWVRQAPGKGLEWVSSISGSGSDTL
YADSVKGRFTISRDNAKTTLYLQMNSLRPEDTAVYYCTIGGSLSRSSQGTLVTVSS
< , SEQ ID NO: 537“; PRT; ->”
EVQLVESGGGLVQPGNSLRLSCAASGFTFSSFGMSWVRQAPGKGLEWVSSIS
GSGSDTLYADSVKGRFTISRDNAKTTLYLQMNSLRPEDTAVYYCTIGGSLSRSSQGT
LVTVSSGGGGSGGGSEVQLVESGGGLVQPGGSLRLSCAASGSIFKVNAMGWYRQAP
GKGRELVAGIISGGSTNYADSVKGRLTISRDNAKNTVYLQMNSLRPEDTAVYYCSFV
TTNSDYDLGRDYWGQGTLVTVSSGGGGSGGGSEVQLVESGGGLVQPGGSLRLSCA
ASGSIFKVNAMGWYRQAPGKGRELVAGIISGGSTNYADSVKGRLTISRDNAKNTVY
LQMNSLRPEDTAVYYCSFVTTNSDYDLGRDYWGQGTLVTVSS
< , SEQ ID NO: 538“; PRT; ->”
EVQLVESGGGLVQPGNSLRLSCAASGFTFSSFGMSWVRQAPGKGLEWVSSIS
GSGSDTLYADSVKGRFTISRDNAKTTLYLQMNSLRPEDTAVYYCTIGGSLSRSSQGT
LVTVSSGGGGSGGGSEVQLVESGGGLVQPGGSLRLSCAASGSIFKVNAMGWYRQAP
GKGRELVAGIISGGSTNYADSVKGRFTISRDNAKNTVYLQMNSLRPEDTAVYYCSFV
TTNSDYDLGRDYWGQGTLVTVSSGGGGSGGGSEVQLVESGGGLVQPGGSLRLSCA
ASGSIFKVNAMGWYRQAPGKGRELVAGIISGGSTNYADSVKGRFTISRDNAKNTVY
LQMNSLRPEDTAVYYCSFVTTNSDYDLGRDYWGQGTLVTVSS
< , SEQ ID NO: 539“; PRT; ->”
EVQLVESGGGLVQPGNSLRLSCAASGFTFSSFGMSWVRQAPGKGLEWVSSIS
GSGSDTLYADSVKGRFTISRDNAKTTLYLQMNSLRPEDTAVYYCTIGGSLSRSSQGT
LVTVSSGGGGSGGGSEVQLVESGGGLVQPGGSLRLSCAASGSIFKVNAMGWYRQAP
GKGRELVAGIISGGSTNYADSVKGRLTISRDNAKNTLYLQMNSLRPEDTAVYYCSFV
TTNSDYDLGRDYWGQGTLVTVSSGGGGSGGGSEVQLVESGGGLVQPGGSLRLSCA
ASGSIFKVNAMGWYRQAPGKGRELVAGIISGGSTNYADSVKGRLTISRDNAKNTLYL
QMNSLRPEDTAVYYCSFVTTNSDYDLGRDYWGQGTLVTVSS
< , SEQ ID NO: 540“; PRT; ->”
EVQLVESGGGLVQPGNSLRLSCAASGFTFSSFGMSWVRQAPGKGLEWVSSIS
GSGSDTLYADSVKGRFTISRDNAKTTLYLQMNSLRPEDTAVYYCTIGGSLSRSSQGT
LVTVSSGGGGSGGGSEVQLVESGGGLVQPGGSLRLSCAASGSIFKVNAMGWYRQAP
GKGRELVAGIISGGSTNYADSVKGRLTISRDNAKNTVYLQMNSLRPEDTAVYYCAF
VTTNSDYDLGRDYWGQGTLVTVSSGGGGSGGGSEVQLVESGGGLVQPGGSLRLSC
AASGSIFKVNAMGWYRQAPGKGRELVAGIISGGSTNYADSVKGRLTISRDNAKNTV
YLQMNSLRPEDTAVYYCAFVTTNSDYDLGRDYWGQGTLVTVSS
< , SEQ ID NO: 541“; PRT; ->”
EVQLVESGGGLVQPGNSLRLSCAASGFTFSSFGMSWVRQAPGKGLEWVSSIS
GSGSDTLYADSVKGRFTISRDNAKTTLYLQMNSLRPEDTAVYYCTIGGSLSRSSQGT
LVTVSSGGGGSGGGSEVQLVESGGGLVQPGGSLRLSCAASGSIFKVNAMGWYRQAP
GKGRELVAGIISGGSTNYADSVKGRFTISRDNAKNTLYLQMNSLRPEDTAVYYCAFV
TTNSDYDLGRDYWGQGTLVTVSSGGGGSGGGSEVQLVESGGGLVQPGGSLRLSCA
ASGSIFKVNAMGWYRQAPGKGRELVAGIISGGSTNYADSVKGRFTISRDNAKNTLYL
QMNSLRPEDTAVYYCAFVTTNSDYDLGRDYWGQGTLVTVSS
< SEQ ID NO: 542“; PRT; ->”
EVQLVESGGGLVQPGNSLRLSCAASGFTFSSFGMSWVRQAPGKGLEWVSSIS
GSGSDTLYADSVKGRFTISRDNAKTTLYLQMNSLRPEDTAVYYCTIGGSLSRSSQGT
LVTVSSGGGGSGGGSEVQLVESGGGLVQPGGSLRLSCAASGFTFDDYDIGWFRQAP
GKGREGVSGISSSDGNTYYADSVKGRFTISSDNAKNTVYLQMNSLRPEDTAVYYCA
AEPPDSSWYLDGSPEFFKYWGQGTLVTVSSGGGGSGGGSEVQLVESGGGLVQPGGS
LRLSCAASGFTFDDYDIGWFRQAPGKGREGVSGISSSDGNTYYADSVKGRFTISSDN
AKNTVYLQMNSLRPEDTAVYYCAAEPPDSSWYLDGSPEFFKYWGQGTLVTVSS
< , SEQ ID NO: 543“; PRT; ->”
EVQLVESGGGLVQPGNSLRLSCAASGFTFSSFGMSWVRQAPGKGLEWVSSIS
GSGSDTLYADSVKGRFTISRDNAKTTLYLQMNSLRPEDTAVYYCTIGGSLSRSSQGT
LVTVSSGGGGSGGGSEVQLVESGGGLVQPGGSLRLSCAASGFTFSDYDIGWFRQAPG
KGREGVSGISSSDGNTYYADSVKGRFTISSDNAKNTVYLQMNSLRPEDTAVYYCAA
EPPDSSWYLDGSPEFFKYWGQGTLVTVSSGGGGSGGGSEVQLVESGGGLVQPGGSL
RLSCAASGFTFSDYDIGWFRQAPGKGREGVSGISSSDGNTYYADSVKGRFTISSDNA
KNTVYLQMNSLRPEDTAVYYCAAEPPDSSWYLDGSPEFFKYWGQGTLVTVSS
< , SEQ ID NO: 544“; PRT; ->”
EVQLVESGGGLVQPGNSLRLSCAASGFTFSSFGMSWVRQAPGKGLEWVSSIS
GSGSDTLYADSVKGRFTISRDNAKTTLYLQMNSLRPEDTAVYYCTIGGSLSRSSQGT
LVTVSSGGGGSGGGSEVQLVESGGGLVQPGGSLRLSCAASGFTFDDYDIGWFRQAP
GKGREGVSGISSSDGNTYYADSVKGRFTISRDNAKNTVYLQMNSLRPEDTAVYYCA
AEPPDSSWYLDGSPEFFKYWGQGTLVTVSSGGGGSGGGSEVQLVESGGGLVQPGGS
LRLSCAASGFTFDDYDIGWFRQAPGKGREGVSGISSSDGNTYYADSVKGRFTISRDN
AKNTVYLQMNSLRPEDTAVYYCAAEPPDSSWYLDGSPEFFKYWGQGTLVTVSS
< , SEQ ID NO: 545“; PRT; ->”
EVQLVESGGGLVQPGNSLRLSCAASGFTFSSFGMSWVRQAPGKGLEWVSSIS
GSGSDTLYADSVKGRFTISRDNAKTTLYLQMNSLRPEDTAVYYCTIGGSLSRSSQGT
LVTVSSGGGGSGGGSEVQLVESGGGLVQPGGSLRLSCAASGFTFDDYDIGWFRQAP
GKGREGVSGISSSDGNTYYADSVKGRFTISSDNAKNTLYLQMNSLRPEDTAVYYCA
AEPPDSSWYLDGSPEFFKYWGQGTLVTVSSGGGGSGGGSEVQLVESGGGLVQPGGS
LRLSCAASGFTFDDYDIGWFRQAPGKGREGVSGISSSDGNTYYADSVKGRFTISSDN
AKNTLYLQMNSLRPEDTAVYYCAAEPPDSSWYLDGSPEFFKYWGQGTLVTVSS
< , SEQ ID NO: 546“; PRT; ->”
EVQLVESGGGLVQPGNSLRLSCAASGFTFSSFGMSWVRQAPGKGLEWVSSIS
GSGSDTLYADSVKGRFTISRDNAKTTLYLQMNSLRPEDTAVYYCTIGGSLSRSSQGT
LVTVSSGGGGSGGGSEVQLVESGGGLVQPGGSLRLSCAASGFTFSDYDIGWFRQAPG
KGREGVSGISSSDGNTYYADSVKGRFTISRDNAKNTLYLQMNSLRPEDTAVYYCAA
EPPDSSWYLDGSPEFFKYWGQGTLVTVSSGGGGSGGGSEVQLVESGGGLVQPGGSL
RLSCAASGFTFSDYDIGWFRQAPGKGREGVSGISSSDGNTYYADSVKGRFTISRDNA
KNTLYLQMNSLRPEDTAVYYCAAEPPDSSWYLDGSPEFFKYWGQGTLVTVSS
< , SEQ ID NO: 547“; PRT; ->”
EVQLVESGGGLVQPGNSLRLSCAASGFTFSSFGMSWVRQAPGKGLEWVSSIS
GSGSDTLYADSVKGRFTISRDNAKTTLYLQMNSLRPEDTAVYYCTIGGSLSRSSQGT
LVTVSSGGGGSGGGSEVQLVESGGGLVQPGGSLRLSCAASGFTFDDYGMSWVRQAP
GRATEWVSAISWNGNNTYYTESMKGRFTISRDNAKNTVYLQMNSLRPEDTAVYYC
VKGSTAIVGVPPTYPDEYDYWGQGTLVTVSSGGGGSGGGSEVQLVESGGGLVQPGG
SLRLSCAASGFTFDDYGMSWVRQAPGRATEWVSAISWNGNNTYYTESMKGRFTISR
DNAKNTVYLQMNSLRPEDTAVYYCVKGSTAIVGVPPTYPDEYDYWGQGTLVTVSS
< , SEQ ID NO: 548“; PRT; ->”
EVQLVESGGGLVQPGNSLRLSCAASGFTFSSFGMSWVRQAPGKGLEWVSSIS
GSGSDTLYADSVKGRFTISRDNAKTTLYLQMNSLRPEDTAVYYCTIGGSLSRSSQGT
LVTVSSGGGGSGGGSEVQLVESGGGLVQPGGSLRLSCAASGFTFDDYGMSWVRQAP
GKGLEWVSAISWNGNNTYYTESMKGRFTISRDNAKNTVYLQMNSLRPEDTAVYYC
VKGSTAIVGVPPTYPDEYDYWGQGTLVTVSSGGGGSGGGSEVQLVESGGGLVQPGG
SLRLSCAASGFTFDDYGMSWVRQAPGKGLEWVSAISWNGNNTYYTESMKGRFTISR
DNAKNTVYLQMNSLRPEDTAVYYCVKGSTAIVGVPPTYPDEYDYWGQGTLVTVSS
< , SEQ ID NO: 549“; PRT; ->”
EVQLVESGGGLVQPGNSLRLSCAASGFTFSSFGMSWVRQAPGKGLEWVSSIS
GSGSDTLYADSVKGRFTISRDNAKTTLYLQMNSLRPEDTAVYYCTIGGSLSRSSQGT
LVTVSSGGGGSGGGSEVQLVESGGGLVQPGGSLRLSCAASGFTFDDYGMSWVRQAP
GRATEWVSAISWNGNNTYYTESMKGRFTISRDNAKNTLYLQMNSLRPEDTAVYYC
VKGSTAIVGVPPTYPDEYDYWGQGTLVTVSSGGGGSGGGSEVQLVESGGGLVQPGG
SLRLSCAASGFTFDDYGMSWVRQAPGRATEWVSAISWNGNNTYYTESMKGRFTISR
DNAKNTLYLQMNSLRPEDTAVYYCVKGSTAIVGVPPTYPDEYDYWGQGTLVTVSS
< , SEQ ID NO: 550“; PRT; ->”
EVQLVESGGGLVQPGNSLRLSCAASGFTFSSFGMSWVRQAPGKGLEWVSSIS
GSGSDTLYADSVKGRFTISRDNAKTTLYLQMNSLRPEDTAVYYCTIGGSLSRSSQGT
LVTVSSGGGGSGGGSEVQLVESGGGLVQPGGSLRLSCAASGFTFDDYGMSWVRQAP
GKGLEWVSAISWNGNNTYYTESMKGRFTISRDNAKNTLYLQMNSLRPEDTAVYYC
VKGSTAIVGVPPTYPDEYDYWGQGTLVTVSSGGGGSGGGSEVQLVESGGGLVQPGG
SLRLSCAASGFTFDDYGMSWVRQAPGKGLEWVSAISWNGNNTYYTESMKGRFTISR
DNAKNTLYLQMNSLRPEDTAVYYCVKGSTAIVGVPPTYPDEYDYWGQGTLVTVSS
< , SEQ ID NO: 551“; PRT; ->”
EVQLVESGGGLVQPGNSLRLSCAASGFTFSSFGMSWVRQAPGKGLEWVSSIS
GSGSDTLYADSVKGRFTISRDNAKTTLYLQMNSLRPEDTAVYYCTIGGSLSRSSQGT
LVTVSSGGGGSGGGSEVQLVESGGGLVQPGGSLRLSCAASGFTFDDYGMSWVRQAP
GRGLEWVSAISWNGNNTYYTESMKGRFTISRDNAKNTLYLQMNSLRPEDTAVYYC
VKGSTAIVGVPPTYPDEYDYWGQGTLVTVSSGGGGSGGGSEVQLVESGGGLVQPGG
SLRLSCAASGFTFDDYGMSWVRQAPGRGLEWVSAISWNGNNTYYTESMKGRFTISR
DNAKNTLYLQMNSLRPEDTAVYYCVKGSTAIVGVPPTYPDEYDYWGQGTLVTVSS
< , SEQ ID NO: 552“; PRT; ->”
EVQLVESGGGLVQPGNSLRLSCAASGFTFSSFGMSWVRQAPGKGLEWVSSIS
GSGSDTLYADSVKGRFTISRDNAKTTLYLQMNSLRPEDTAVYYCTIGGSLSRSSQGT
LVTVSSGGGGSGGGSEVQLVESGGGLVQPGGSLRLSCAASGFTFDDYGMSWVRQAP
GRALEWVSAISWNGNNTYYTESMKGRFTISRDNAKNTLYLQMNSLRPEDTAVYYC
VKGSTAIVGVPPTYPDEYDYWGQGTLVTVSSGGGGSGGGSEVQLVESGGGLVQPGG
SLRLSCAASGFTFDDYGMSWVRQAPGRALEWVSAISWNGNNTYYTESMKGRFTISR
DNAKNTLYLQMNSLRPEDTAVYYCVKGSTAIVGVPPTYPDEYDYWGQGTLVTVSS
< , SEQ ID NO: 553“; PRT; ->”
EVQLVESGGGLVQPGNSLRLSCAASGFTFSSFGMSWVRQAPGKGLEWVSSIS
GSGSDTLYADSVKGRFTISRDNAKTTLYLQMNSLRPEDTAVYYCTIGGSLSRSSQGT
LVTVSSGGGGSGGGSEVQLVESGGGLVQPGGSLRLSCAASGFTFDDYGMSWVRQAP
GKATEWVSAISWNGNNTYYTESMKGRFTISRDNAKNTLYLQMNSLRPEDTAVYYC
VKGSTAIVGVPPTYPDEYDYWGQGTLVTVSSGGGGSGGGSEVQLVESGGGLVQPGG
SLRLSCAASGFTFDDYGMSWVRQAPGKATEWVSAISWNGNNTYYTESMKGRFTISR
DNAKNTLYLQMNSLRPEDTAVYYCVKGSTAIVGVPPTYPDEYDYWGQGTLVTVSS
< , SEQ ID NO: 554“; PRT; ->”
EVQLVESGGGLVQPGNSLRLSCAASGFTFSSFGMSWVRQAPGKGLEWVSSIS
GSGSDTLYADSVKGRFTISRDNAKTTLYLQMNSLRPEDTAVYYCTIGGSLSRSSQGT
LVTVSSGGGGSGGGSEVQLVESGGGLVQPGGSLRLSCAASGFTFDDYGMSWVRQAP
GKGTEWVSAISWNGNNTYYTESMKGRFTISRDNAKNTLYLQMNSLRPEDTAVYYC
VKGSTAIVGVPPTYPDEYDYWGQGTLVTVSSGGGGSGGGSEVQLVESGGGLVQPGG
SLRLSCAASGFTFDDYGMSWVRQAPGKGTEWVSAISWNGNNTYYTESMKGRFTISR
DNAKNTLYLQMNSLRPEDTAVYYCVKGSTAIVGVPPTYPDEYDYWGQGTLVTVSS
< , SEQ ID NO: 555“; PRT; ->”
EVQLVESGGGLVQPGNSLRLSCAASGFTFSSFGMSWVRQAPGKGLEWVSSIS
GSGSDTLYADSVKGRFTISRDNAKTTLYLQMNSLRPEDTAVYYCTIGGSLSRSSQGT
LVTVSSGGGGSGGGSEVQLVESGGGLVQPGGSLRLSCAASGFTFDDYGMSWVRQAP
GRGTEWVSAISWNGNNTYYTESMKGRFTISRDNAKNTLYLQMNSLRPEDTAVYYC
VKGSTAIVGVPPTYPDEYDYWGQGTLVTVSSGGGGSGGGSEVQLVESGGGLVQPGG
SLRLSCAASGFTFDDYGMSWVRQAPGRGTEWVSAISWNGNNTYYTESMKGRFTISR
DNAKNTLYLQMNSLRPEDTAVYYCVKGSTAIVGVPPTYPDEYDYWGQGTLVTVSS
< , SEQ ID NO: 556“; PRT; ->”
EVQLVESGGGLVQPGNSLRLSCAASGFTFSSFGMSWVRQAPGKGLEWVSSIS
GSGSDTLYADSVKGRFTISRDNAKTTLYLQMNSLRPEDTAVYYCTIGGSLSRSSQGT
LVTVSSGGGGSGGGSEVQLVESGGGLVQPGGSLRLSCAASGFTFDDYGMSWVRQAP
GKALEWVSAISWNGNNTYYTESMKGRFTISRDNAKNTLYLQMNSLRPEDTAVYYC
VKGSTAIVGVPPTYPDEYDYWGQGTLVTVSSGGGGSGGGSEVQLVESGGGLVQPGG
SLRLSCAASGFTFDDYGMSWVRQAPGKALEWVSAISWNGNNTYYTESMKGRFTISR
DNAKNTLYLQMNSLRPEDTAVYYCVKGSTAIVGVPPTYPDEYDYWGQGTLVTVSS
< , SEQ ID NO: 557“; PRT; ->”
EVQLVESGGGLVQPGNSLRLSCAASGFTFSSFGMSWVRQAPGKGLEWVSSIS
GSGSDTLYADSVKGRFTISRDNAKTTLYLQMNSLRPEDTAVYYCTIGGSLSRSSQGT
LVTVSSGGGGSGGGSEVQLVESGGGLVQPGGSLRLSCAASGFTFSDYGMSWVRQAP
GKGTEWVSAISWNGNNTYYTESMKGRFTISRDNAKNTLYLQMNSLRPEDTAVYYC
VKGSTAIVGVPPTYPDEYDYWGQGTLVTVSSGGGGSGGGSEVQLVESGGGLVQPGG
SLRLSCAASGFTFSDYGMSWVRQAPGKGTEWVSAISWNGNNTYYTESMKGRFTISR
DNAKNTLYLQMNSLRPEDTAVYYCVKGSTAIVGVPPTYPDEYDYWGQGTLVTVSS
< , SEQ ID NO: 558“; PRT; ->”
EVQLVESGGGLVQPGNSLRLSCAASGFTFSSFGMSWVRQAPGKGLEWVSSIS
GSGSDTLYADSVKGRFTISRDNAKTTLYLQMNSLRPEDTAVYYCTIGGSLSRSSQGT
LVTVSSGGGGSGGGSEVQLVESGGGLVQPGGSLRLSCAASGFTFSDYGMSWVRQAP
GKGTEWVSAISWNGNNTYYTESMKGRFTISRDNAKNTLYLQMNSLRPEDTAVYYC
AKGSTAIVGVPPTYPDEYDYWGQGTLVTVSSGGGGSGGGSEVQLVESGGGLVQPGG
SLRLSCAASGFTFSDYGMSWVRQAPGKGTEWVSAISWNGNNTYYTESMKGRFTISR
DNAKNTLYLQMNSLRPEDTAVYYCAKGSTAIVGVPPTYPDEYDYWGQGTLVTVSS
Humanized bispecific polypeptides against the IL6 receptor and human serum albumin
< , SEQ ID NO: 559“; PRT; ->”
EVQLVESGGGLVQPGGSLRLSCAASGSIFKVNAMGWYRQAPGKGRELVAGII
SGGSTNYADSVKGRLTISRDNAKNTVYLQMNSLRPEDTAVYYCSFVTTNSDYDLGR
DYWGQGTLVTVSSGGGGSGGGSEVQLVESGGGLVQPGNSLRLSCAASGFTFSSFGM
SWVRQAPGKGLEWVSSISGSGSDTLYADSVKGRFTISRDNAKTTLYLQMNSLRPEDT
AVYYCTIGGSLSRSSQGTLVTVSS
< , SEQ ID NO: 560“; PRT; ->”
EVQLVESGGGLVQPGGSLRLSCAASGSIFKVNAMGWYRQAPGKGRELVAGII
SGGSTNYADSVKGRFTISRDNAKNTVYLQMNSLRPEDTAVYYCSFVTTNSDYDLGR
DYWGQGTLVTVSSGGGGSGGGSEVQLVESGGGLVQPGNSLRLSCAASGFTFSSFGM
SWVRQAPGKGLEWVSSISGSGSDTLYADSVKGRFTISRDNAKTTLYLQMNSLRPEDT
AVYYCTIGGSLSRSSQGTLVTVSS
< , SEQ ID NO: 561“; PRT; ->”
EVQLVESGGGLVQPGGSLRLSCAASGSIFKVNAMGWYRQAPGKGRELVAGII
SGGSTNYADSVKGRLTISRDNAKNTLYLQMNSLRPEDTAVYYCSFVTTNSDYDLGR
DYWGQGTLVTVSSGGGGSGGGSEVQLVESGGGLVQPGNSLRLSCAASGFTFSSFGM
SWVRQAPGKGLEWVSSISGSGSDTLYADSVKGRFTISRDNAKTTLYLQMNSLRPEDT
AVYYCTIGGSLSRSSQGTLVTVSS
< , SEQ ID NO: 562“; PRT; ->”
EVQLVESGGGLVQPGGSLRLSCAASGSIFKVNAMGWYRQAPGKGRELVAGII
SGGSTNYADSVKGRLTISRDNAKNTVYLQMNSLRPEDTAVYYCAFVTTNSDYDLGR
DYWGQGTLVTVSSGGGGSGGGSEVQLVESGGGLVQPGNSLRLSCAASGFTFSSFGM
SWVRQAPGKGLEWVSSISGSGSDTLYADSVKGRFTISRDNAKTTLYLQMNSLRPEDT
AVYYCTIGGSLSRSSQGTLVTVSS
< IL6R66, SEQ ID NO: 563“; PRT; ->”
EVQLVESGGGLVQPGGSLRLSCAASGSIFKVNAMGWYRQAPGKGRELVAGII
SGGSTNYADSVKGRFTISRDNAKNTLYLQMNSLRPEDTAVYYCAFVTTNSDYDLGR
DYWGQGTLVTVSSGGGGSGGGSEVQLVESGGGLVQPGNSLRLSCAASGFTFSSFGM
SWVRQAPGKGLEWVSSISGSGSDTLYADSVKGRFTISRDNAKTTLYLQMNSLRPEDT
AVYYCTIGGSLSRSSQGTLVTVSS
< , SEQ ID NO: 564“; PRT; ->”
EVQLVESGGGLVQPGGSLRLSCAASGFTFDDYDIGWFRQAPGKGREGVSGIS
SSDGNTYYADSVKGRFTISSDNAKNTVYLQMNSLRPEDTAVYYCAAEPPDSSWYLD
GSPEFFKYWGQGTLVTVSSGGGGSGGGSEVQLVESGGGLVQPGNSLRLSCAASGFTF
SSFGMSWVRQAPGKGLEWVSSISGSGSDTLYADSVKGRFTISRDNAKTTLYLQMNSL
RPEDTAVYYCTIGGSLSRSSQGTLVTVSS
< , SEQ ID NO: 565“; PRT; ->”
EVQLVESGGGLVQPGGSLRLSCAASGFTFSDYDIGWFRQAPGKGREGVSGISS
SDGNTYYADSVKGRFTISSDNAKNTVYLQMNSLRPEDTAVYYCAAEPPDSSWYLDG
SPEFFKYWGQGTLVTVSSGGGGSGGGSEVQLVESGGGLVQPGNSLRLSCAASGFTFS
SFGMSWVRQAPGKGLEWVSSISGSGSDTLYADSVKGRFTISRDNAKTTLYLQMNSL
RPEDTAVYYCTIGGSLSRSSQGTLVTVSS
< , SEQ ID NO: 566“; PRT; ->”
EVQLVESGGGLVQPGGSLRLSCAASGFTFDDYDIGWFRQAPGKGREGVSGIS
SSDGNTYYADSVKGRFTISRDNAKNTVYLQMNSLRPEDTAVYYCAAEPPDSSWYLD
GSPEFFKYWGQGTLVTVSSGGGGSGGGSEVQLVESGGGLVQPGNSLRLSCAASGFTF
SSFGMSWVRQAPGKGLEWVSSISGSGSDTLYADSVKGRFTISRDNAKTTLYLQMNSL
RPEDTAVYYCTIGGSLSRSSQGTLVTVSS
< , SEQ ID NO: 567“; PRT; ->”
EVQLVESGGGLVQPGGSLRLSCAASGFTFDDYDIGWFRQAPGKGREGVSGIS
SSDGNTYYADSVKGRFTISSDNAKNTLYLQMNSLRPEDTAVYYCAAEPPDSSWYLD
GSPEFFKYWGQGTLVTVSSGGGGSGGGSEVQLVESGGGLVQPGNSLRLSCAASGFTF
SSFGMSWVRQAPGKGLEWVSSISGSGSDTLYADSVKGRFTISRDNAKTTLYLQMNSL
RPEDTAVYYCTIGGSLSRSSQGTLVTVSS
< IL6R202, SEQ ID NO: 568“; PRT; ->”
EVQLVESGGGLVQPGGSLRLSCAASGFTFSDYDIGWFRQAPGKGREGVSGISS
SDGNTYYADSVKGRFTISRDNAKNTLYLQMNSLRPEDTAVYYCAAEPPDSSWYLDG
SPEFFKYWGQGTLVTVSSGGGGSGGGSEVQLVESGGGLVQPGNSLRLSCAASGFTFS
SFGMSWVRQAPGKGLEWVSSISGSGSDTLYADSVKGRFTISRDNAKTTLYLQMNSL
RPEDTAVYYCTIGGSLSRSSQGTLVTVSS
< , SEQ ID NO: 569“; PRT; ->”
EVQLVESGGGLVQPGGSLRLSCAASGFTFDDYGMSWVRQAPGRATEWVSAI
SWNGNNTYYTESMKGRFTISRDNAKNTVYLQMNSLRPEDTAVYYCVKGSTAIVGVP
PTYPDEYDYWGQGTLVTVSSGGGGSGGGSEVQLVESGGGLVQPGNSLRLSCAASGF
TFSSFGMSWVRQAPGKGLEWVSSISGSGSDTLYADSVKGRFTISRDNAKTTLYLQMN
SLRPEDTAVYYCTIGGSLSRSSQGTLVTVSS
< , SEQ ID NO: 570“; PRT; ->”
EVQLVESGGGLVQPGGSLRLSCAASGFTFDDYGMSWVRQAPGKGLEWVSAI
SWNGNNTYYTESMKGRFTISRDNAKNTVYLQMNSLRPEDTAVYYCVKGSTAIVGVP
PTYPDEYDYWGQGTLVTVSSGGGGSGGGSEVQLVESGGGLVQPGNSLRLSCAASGF
TFSSFGMSWVRQAPGKGLEWVSSISGSGSDTLYADSVKGRFTISRDNAKTTLYLQMN
SLRPEDTAVYYCTIGGSLSRSSQGTLVTVSS
< , SEQ ID NO: 571“; PRT; ->”
EVQLVESGGGLVQPGGSLRLSCAASGETFDDYGMSWVRQAPGRATEWVSAI
SWNGNNTYYTESMKGRFTISRDNAKNTLYLQMNSLRPEDTAVYYCVKGSTAIVGVP
PTYPDEYDYWGQGTLVTVSSGGGGSGGGSEVQLVESGGGLVQPGNSLRLSCAASGF
TFSSFGMSWVRQAPGKGLEWVSSISGSGSDTLYADSVKGRFTISRDNAKTTLYLQMN
SLRPEDTAVYYCTIGGSLSRSSQGTLVTVSS
< , SEQ ID NO: 572“; PRT; ->”
EVQLVESGGGLVQPGGSLRLSCAASGFTFDDYGMSWVRQAPGKGLEWVSAI
SWNGNNTYYTESMKGRFTISRDNAKNTLYLQMNSLRPEDTAVYYCVKGSTAIVGVP
PTYPDEYDYWGQGTLVTVSSGGGGSGGGSEVQLVESGGGLVQPGNSLRLSCAASGF
TFSSFGMSWVRQAPGKGLEWVSSISGSGSDTLYADSVKGRFTISRDNAKTTLYLQMN
SLRPEDTAVYYCTIGGSLSRSSQGTLVTVSS
< , SEQ ID NO: 573“; PRT; ->”
EVQLVESGGGLVQPGGSLRLSCAASGFTFDDYGMSWVRQAPGRGLEWVSAI
SWNGNNTYYTESMKGRFTISRDNAKNTLYLQMNSLRPEDTAVYYCVKGSTAIVGVP
PTYPDEYDYWGQGTLVTVSSGGGGSGGGSEVQLVESGGGLVQPGNSLRLSCAASGF
TFSSFGMSWVRQAPGKGLEWVSSISGSGSDTLYADSVKGRFTISRDNAKTTLYLQMN
SLRPEDTAVYYCTIGGSLSRSSQGTLVTVSS
< , SEQ ID NO: 574“; PRT; ->”
EVQLVESGGGLVQPGGSLRLSCAASGFTFDDYGMSWVRQAPGRALEWVSAI
SWNGNNTYYTESMKGRFTISRDNAKNTLYLQMNSLRPEDTAVYYCVKGSTAIVGVP
PTYPDEYDYWGQGTLVTVSSGGGGSGGGSEVQLVESGGGLVQPGNSLRLSCAASGF
TFSSFGMSWVRQAPGKGLEWVSSISGSGSDTLYADSVKGRFTISRDNAKTTLYLQMN
SLRPEDTAVYYCTIGGSLSRSSQGTLVTVSS
< , SEQ ID NO: 575“; PRT; ->”
EVQLVESGGGLVQPGGSLRLSCAASGFTFDDYGMSWVRQAPGKATEWVSAI
SWNGNNTYYTESMKGRFTISRDNAKNTLYLQMNSLRPEDTAVYYCVKGSTAIVGVP
PTYPDEYDYWGQGTLVTVSSGGGGSGGGSEVQLVESGGGLVQPGNSLRLSCAASGF
TFSSFGMSWVRQAPGKGLEWVSSISGSGSDTLYADSVKGRFTISRDNAKTTLYLQMN
SLRPEDTAVYYCTIGGSLSRSSQGTLVTVSS
< IL6R91, SEQ ID NO: 576“; PRT; ->”
EVQLVESGGGLVQPGGSLRLSCAASGFTFDDYGMSWVRQAPGKGTEWVSAI
SWNGNNTYYTESMKGRFTISRDNAKNTLYLQMNSLRPEDTAVYYCVKGSTAIVGVP
PTYPDEYDYWGQGTLVTVSSGGGGSGGGSEVQLVESGGGLVQPGNSLRLSCAASGF
TFSSFGMSWVRQAPGKGLEWVSSISGSGSDTLYADSVKGRFTISRDNAKTTLYLQMN
SLRPEDTAVYYCTIGGSLSRSSQGTLVTVSS
< , SEQ ID NO: 577“; PRT; ->”
EVQLVESGGGLVQPGGSLRLSCAASGFTFDDYGMSWVRQAPGRGTEWVSAI
SWNGNNTYYTESMKGRFTISRDNAKNTLYLQMNSLRPEDTAVYYCVKGSTAIVGVP
PTYPDEYDYWGQGTLVTVSSGGGGSGGGSEVQLVESGGGLVQPGNSLRLSCAASGF
TFSSFGMSWVRQAPGKGLEWVSSISGSGSDTLYADSVKGRFTISRDNAKTTLYLQMN
SLRPEDTAVYYCTIGGSLSRSSQGTLVTVSS
< , SEQ ID NO: 578“; PRT; ->”
EVQLVESGGGLVQPGGSLRLSCAASGFTFDDYGMSWVRQAPGKALEWVSAI
SWNGNNTYYTESMKGRFTISRDNAKNTLYLQMNSLRPEDTAVYYCVKGSTAIVGVP
PTYPDEYDYWGQGTLVTVSSGGGGSGGGSEVQLVESGGGLVQPGNSLRLSCAASGF
TFSSFGMSWVRQAPGKGLEWVSSISGSGSDTLYADSVKGRFTISRDNAKTTLYLQMN
SLRPEDTAVYYCTIGGSLSRSSQGTLVTVSS
< , SEQ ID NO: 579“; PRT; ->”
EVQLVESGGGLVQPGGSLRLSCAASGFTFSDYGMSWVRQAPGKGTEWVSAI
SWNGNNTYYTESMKGRFTISRDNAKNTLYLQMNSLRPEDTAVYYCVKGSTAIVGVP
PTYPDEYDYWGQGTLVTVSSGGGGSGGGSEVQLVESGGGLVQPGNSLRLSCAASGF
TFSSFGMSWVRQAPGKGLEWVSSISGSGSDTLYADSVKGRFTISRDNAKTTLYLQMN
SLRPEDTAVYYCTIGGSLSRSSQGTLVTVSS
< , SEQ ID NO: 580“; PRT; ->”
EVQLVESGGGLVQPGGSLRLSCAASGFTFSDYGMSWVRQAPGKGTEWVSAI
SWNGNNTYYTESMKGRFTISRDNAKNTLYLQMNSLRPEDTAVYYCAKGSTAIVGVP
PTYPDEYDYWGQGTLVTVSSGGGGSGGGSEVQLVESGGGLVQPGNSLRLSCAASGF
TFSSFGMSWVRQAPGKGLEWVSSISGSGSDTLYADSVKGRFTISRDNAKTTLYLQMN
SLRPEDTAVYYCTIGGSLSRSSQGTLVTVSS
< , SEQ ID NO: 581“; PRT; ->”
EVQLVESGGGLVQPGNSLRLSCAASGFTFSSFGMSWVRQAPGKGLEWVSSIS
GSGSDTLYADSVKGRFTISRDNAKTTLYLQMNSLRPEDTAVYYCTIGGSLSRSSQGT
LVTVSSGGGGSGGGSEVQLVESGGGLVQPGGSLRLSCAASGSIFKVNAMGWYRQAP
GKGRELVAGIISGGSTNYADSVKGRLTISRDNAKNTVYLQMNSLRPEDTAVYYCSFV
TTNSDYDLGRDYWGQGTLVTVSS
< , SEQ ID NO: 582“; PRT; ->”
EVQLVESGGGLVQPGNSLRLSCAASGFTFSSFGMSWVRQAPGKGLEWVSSIS
GSGSDTLYADSVKGRFTISRDNAKTTLYLQMNSLRPEDTAVYYCTIGGSLSRSSQGT
LVTVSSGGGGSGGGSEVQLVESGGGLVQPGGSLRLSCAASGSIFKVNAMGWYRQAP
GKGRELVAGIISGGSTNYADSVKGRFTISRDNAKNTVYLQMNSLRPEDTAVYYCSFV
TTNSDYDLGRDYWGQGTLVTVSS
< , SEQ ID NO: 583“; PRT; ->”
EVQLVESGGGLVQPGNSLRLSCAASGFTFSSFGMSWVRQAPGKGLEWVSSIS
GSGSDTLYADSVKGRFTISRDNAKTTLYLQMNSLRPEDTAVYYCTIGGSLSRSSQGT
LVTVSSGGGGSGGGSEVQLVESGGGLVQPGGSLRLSCAASGSIFKVNAMGWYRQAP
GKGRELVAGIISGGSTNYADSVKGRLTISRDNAKNTLYLQMNSLRPEDTAVYYCSFV
TTNSDYDLGRDYWGQGTLVTVSS
< , SEQ ID NO: 584“; PRT; ->”
EVQLVESGGGLVQPGNSLRLSCAASGFTFSSFGMSWVRQAPGKGLEWVSSIS
GSGSDTLYADSVKGRFTISRDNAKTTLYLQMNSLRPEDTAVYYCTIGGSLSRSSQGT
LVTVSSGGGGSGGGSEVQLVESGGGLVQPGGSLRLSCAASGSIFKVNAMGWYRQAP
GKGRELVAGIISGGSTNYADSVKGRLTISRDNAKNTVYLQMNSLRPEDTAVYYCAF
VTTNSDYDLGRDYWGQGTLVTVSS
< , SEQ ID NO: 585“; PRT; ->”
EVQLVESGGGLVQPGNSLRLSCAASGFTFSSFGMSWVRQAPGKGLEWVSSIS
GSGSDTLYADSVKGRFTISRDNAKTTLYLQMNSLRPEDTAVYYCTIGGSLSRSSQGT
LVTVSSGGGGSGGGSEVQLVESGGGLVQPGGSLRLSCAASGSIFKVNAMGWYRQAP
GKGRELVAGIISGGSTNYADSVKGRFTISRDNAKNTLYLQMNSLRPEDTAVYYCAFV
TTNSDYDLGRDYWGQGTLVTVSS
< , SEQ ID NO: 586“; PRT; ->”
EVQLVESGGGLVQPGNSLRLSCAASGFTFSSFGMSWVRQAPGKGLEWVSSIS
GSGSDTLYADSVKGRFTISRDNAKTTLYLQMNSLRPEDTAVYYCTIGGSLSRSSQGT
LVTVSSGGGGSGGGSEVQLVESGGGLVQPGGSLRLSCAASGFTFDDYDIGWFRQAP
GKGREGVSGISSSDGNTYYADSVKGRFTISSDNAKNTVYLQMNSLRPEDTAVYYCA
AEPPDSSWYLDGSPEFFKYWGQGTLVTVSS
< , SEQ ID NO: 587“; PRT; ->”
EVQLVESGGGLVQPGNSLRLSCAASGFTFSSFGMSWVRQAPGKGLEWVSSIS
GSGSDTLYADSVKGRFTISRDNAKTTLYLQMNSLRPEDTAVYYCTIGGSLSRSSQGT
LVTVSSGGGGSGGGSEVQLVESGGGLVQPGGSLRLSCAASGFTFSDYDIGWFRQAPG
KGREGVSGISSSDGNTYYADSVKGRFTISSDNAKNTVYLQMNSLRPEDTAVYYCAA
EPPDSSWYLDGSPEFFKYWGQGTLVTVSS
< , SEQ ID NO: 588“; PRT; ->”
EVQLVESGGGLVQPGNSLRLSCAASGFTFSSFGMSWVRQAPGKGLEWVSSIS
GSGSDTLYADSVKGRFTISRDNAKTTLYLQMNSLRPEDTAVYYCTIGGSLSRSSQGT
LVTVSSGGGGSGGGSEVQLVESGGGLVQPGGSLRLSCAASGFTFDDYDIGWFRQAP
GKGREGVSGISSSDGNTYYADSVKGRFTISRDNAKNTVYLQMNSLRPEDTAVYYCA
AEPPDSSWYLDGSPEFFKYWGQGTLVTVSS
< , SEQ ID NO: 589“; PRT; ->”
EVQLVESGGGLVQPGNSLRLSCAASGFTFSSFGMSWVRQAPGKGLEWVSSIS
GSGSDTLYADSVKGRFTISRDNAKTTLYLQMNSLRPEDTAVYYCTIGGSLSRSSQGT
LVTVSSGGGGSGGGSEVQLVESGGGLVQPGGSLRLSCAASGFTFDDYDIGWFRQAP
GKGREGVSGISSSDGNTYYADSVKGRFTISSDNAKNTLYLQMNSLRPEDTAVYYCA
AEPPDSSWYLDGSPEFFKYWGQGTLVTVSS
< , SEQ ID NO: 590“; PRT; ->”
EVQLVESGGGLVQPGNSLRLSCAASGFTFSSFGMSWVRQAPGKGLEWVSSIS
GSGSDTLYADSVKGRFTISRDNAKTTLYLQMNSLRPEDTAVYYCTIGGSLSRSSQGT
LVTVSSGGGGSGGGSEVQLVESGGGLVQPGGSLRLSCAASGFTFSDYDIGWFRQAPG
KGREGVSGISSSDGNTYYADSVKGRFTISRDNAKNTLYLQMNSLRPEDTAVYYCAA
EPPDSSWYLDGSPEFFKYWGQGTLVTVSS
< , SEQ ID NO: 591“; PRT; ->”
EVQLVESGGGLVQPGNSLRLSCAASGFTFSSFGMSWVRQAPGKGLEWVSSIS
GSGSDTLYADSVKGRFTISRDNAKTTLYLQMNSLRPEDTAVYYCTIGGSLSRSSQGT
LVTVSSGGGGSGGGSEVQLVESGGGLVQPGGSLRLSCAASGFTFDDYGMSWVRQAP
GRATEWVSAISWNGNNTYYTESMKGRFTISRDNAKNTVYLQMNSLRPEDTAVYYC
VKGSTAIVGVPPTYPDEYDYWGQGTLVTVSS
< , SEQ ID NO: 592“; PRT; ->”
EVQLVESGGGLVQPGNSLRLSCAASGFTFSSFGMSWVRQAPGKGLEWVSSIS
GSGSDTLYADSVKGRFTISRDNAKTTLYLQMNSLRPEDTAVYYCTIGGSLSRSSQGT
LVTVSSGGGGSGGGSEVQLVESGGGLVQPGGSLRLSCAASGFTFDDYGMSWVRQAP
GKGLEWVSAISWNGNNTYYTESMKGRFTISRDNAKNTVYLQMNSLRPEDTAVYYC
VKGSTAIVGVPPTYPDEYDYWGQGTLVTVSS
< , SEQ ID NO: 593“; PRT; ->”
EVQLVESGGGLVQPGNSLRLSCAASGFTFSSFGMSWVRQAPGKGLEWVSSIS
GSGSDTLYADSVKGRFTISRDNAKTTLYLQMNSLRPEDTAVYYCTIGGSLSRSSQGT
LVTVSSGGGGSGGGSEVQLVESGGGLVQPGGSLRLSCAASGFTFDDYGMSWVRQAP
GRATEWVSAISWNGNNTYYTESMKGRFTISRDNAKNTLYLQMNSLRPEDTAVYYC
VKGSTAIVGVPPTYPDEYDYWGQGTLVTVSS
< , SEQ ID NO: 594“; PRT; ->”
EVQLVESGGGLVQPGNSLRLSCAASGFTFSSFGMSWVRQAPGKGLEWVSSIS
GSGSDTLYADSVKGRFTISRDNAKTTLYLQMNSLRPEDTAVYYCTIGGSLSRSSQGT
LVTVSSGGGGSGGGSEVQLVESGGGLVQPGGSLRLSCAASGFTFDDYGMSWVRQAP
GKGLEWVSAISWNGNNTYYTESMKGRFTISRDNAKNTLYLQMNSLRPEDTAVYYC
VKGSTAIVGVPPTYPDEYDYWGQGTLVTVSS
< , SEQ ID NO: 595“; PRT; ->”
EVQLVESGGGLVQPGNSLRLSCAASGFTFSSFGMSWVRQAPGKGLEWVSSIS
GSGSDTLYADSVKGRFTISRDNAKTTLYLQMNSLRPEDTAVYYCTIGGSLSRSSQGT
LVTVSSGGGGSGGGSEVQLVESGGGLVQPGGSLRLSCAASGFTFDDYGMSWVRQAP
GRGLEWVSAISWNGNNTYYTESMKGRFTISRDNAKNTLYLQMNSLRPEDTAVYYC
VKGSTAIVGVPPTYPDEYDYWGQGTLVTVSS
< , SEQ ID NO: 596“; PRT; ->”
EVQLVESGGGLVQPGNSLRLSCAASGFTFSSFGMSWVRQAPGKGLEWVSSIS
GSGSDTLYADSVKGRFTISRDNAKTTLYLQMNSLRPEDTAVYYCTIGGSLSRSSQGT
LVTVSSGGGGSGGGSEVQLVESGGGLVQPGGSLRLSCAASGFTFDDYGMSWVRQAP
GRALEWVSAISWNGNNTYYTESMKGRFTISRDNAKNTLYLQMNSLRPEDTAVYYC
VKGSTAIVGVPPTYPDEYDYWGQGTLVTVSS
< , SEQ ID NO: 597“; PRT; ->”
EVQLVESGGGLVQPGNSLRLSCAASGFTFSSFGMSWVRQAPGKGLEWVSSIS
GSGSDTLYADSVKGRFTISRDNAKTTLYLQMNSLRPEDTAVYYCTIGGSLSRSSQGT
LVTVSSGGGGSGGGSEVQLVESGGGLVQPGGSLRLSCAASGFTFDDYGMSWVRQAP
GKATEWVSAISWNGNNTYYTESMKGRFTISRDNAKNTLYLQMNSLRPEDTAVYYC
VKGSTAIVGVPPTYPDEYDYWGQGTLVTVSS
< , SEQ ID NO: 598“; PRT; ->”
EVQLVESGGGLVQPGNSLRLSCAASGFTFSSFGMSWVRQAPGKGLEWVSSIS
GSGSDTLYADSVKGRFTISRDNAKTTLYLQMNSLRPEDTAVYYCTIGGSLSRSSQGT
LVTVSSGGGGSGGGSEVQLVESGGGLVQPGGSLRLSCAASGFTFDDYGMSWVRQAP
GKGTEWVSAISWNGNNTYYTESMKGRFTISRDNAKNTLYLQMNSLRPEDTAVYYC
VKGSTAIVGVPPTYPDEYDYWGQGTLVTVSS
< , SEQ ID NO: 599“; PRT; ->”
EVQLVESGGGLVQPGNSLRLSCAASGFTFSSFGMSWVRQAPGKGLEWVSSIS
GSGSDTLYADSVKGRFTISRDNAKTTLYLQMNSLRPEDTAVYYCTIGGSLSRSSQGT
LVTVSSGGGGSGGGSEVQLVESGGGLVQPGGSLRLSCAASGFTFDDYGMSWVRQAP
GRGTEWVSAISWNGNNTYYTESMKGRFTISRDNAKNTLYLQMNSLRPEDTAVYYC
VKGSTAIVGVPPTYPDEYDYWGQGTLVTVSS
< , SEQ ID NO: 600“; PRT; ->”
EVQLVESGGGLVQPGNSLRLSCAASGFTFSSFGMSWVRQAPGKGLEWVSSIS
GSGSDTLYADSVKGRFTISRDNAKTTLYLQMNSLRPEDTAVYYCTIGGSLSRSSQGT
LVTVSSGGGGSGGGSEVQLVESGGGLVQPGGSLRLSCAASGFTFDDYGMSWVRQAP
GKALEWVSAISWNGNNTYYTESMKGRFTISRDNAKNTLYLQMNSLRPEDTAVYYC
VKGSTAIVGVPPTYPDEYDYWGQGTLVTVSS
< , SEQ ID NO: 601“; PRT; ->”
EVQLVESGGGLVQPGNSLRLSCAASGFTFSSFGMSWVRQAPGKGLEWVSSIS
GSGSDTLYADSVKGRFTISRDNAKTTLYLQMNSLRPEDTAVYYCTIGGSLSRSSQGT
LVTVSSGGGGSGGGSEVQLVESGGGLVQPGGSLRLSCAASGFTFSDYGMSWVRQAP
GKGTEWVSAISWNGNNTYYTESMKGRFTISRDNAKNTLYLQMNSLRPEDTAVYYG
VKGSTAIVGVPPTYPDEYDYWGQGTLVTVSS
< , SEQ ID NO: 602“; PRT; ->”
EVQLVESGGGLVQPGNSLRLSCAASGFTFSSFGMSWVRQAPGKGLEWVSSIS
GSGSDTLYADSVKGRFTISRDNAKTTLYLQMNSLRPEDTAVYYCTIGGSLSRSSQGT
LVTVSSGGGGSGGGSEVQLVESGGGLVQPGGSLRLSCAASGFTFSDYGMSWVRQAP
GKGTEWVSAISWNGNNTYYTESMKGRFTISRDNAKNTLYLQMNSLRPEDTAVYYC
AKGSTAIVGVPPTYPDEYDYWGQGTLVTVSS
Anti-IL-6 receptor Nanobody-human serum albumin fusion proteins
< HSA-(GGS)4GG-IL6R04, SEQ ID NO: 603“; PRT; ->”
DAHKSEVAHRFKDLGEENFKALVLIAFAQYLQQCPFEDHVKLVNEVTEFAKT
CVADESAENCDKSLHTLFGDKLCTVATLRETYGEMADCCAKQEPERNECFLQHKDD
NPNLPRLVRPEVDVMCTAFHDNEETFLKKYLYEIARRHPYFYAPELLFFAKRYKAAF
TECCQAADKAACLLPKLDELRDEGKASSAKQRLKCASLQKFGERAFKAWAVARLS
QRFPKAEFAEVSKLVTDLTKVHTECCHGDLLECADDRADLAKYICENQDSISSKLKE
CCEKPLLEKSHCIAEVENDEMPADLPSLAADFVESKDVCKNYAEAKDVFLGMFLYE
YARRHPDYSVVLLLRLAKTYETTLEKCCAAADPHECYAKVFDEFKPLVEEPQNLIKQ
NCELFEQLGEYKFQNALLVRYTKKVPQVSTPTLVEVSRNLGKVGSKCCKHPEAKRM
PCAEDYLSVVLNQLCVLHEKTPVSDRVTKCCTESLVNRRPCFSALEVDETYVPKEFN
AETFTFHADICTLSEKERQIKKQTALVELVKHKPKATKEQLKAVMDDFAAFVEKCC
KADDKETCFAEEGKKLVAASQAALGLGGSGGSGGSGGSGGEVQLVESGGGLVQAG
GSLRLSCAASGFTFDDYDIGWFRQAPGKEREGVSGISSSDGNTYYADSVKGRFTISSD
NAKNTVYLQMNSLKPEDTAVYYCAAEPPDSSWYLDGSPEFFKYWGQGTQVTVSS
< IL6R04-HSA, SEQ ID NO: 604“; PRT; ->”
EVQLVESGGGLVQAGGSLRLSCAASGFTFDDYDIGWFRQAPGKEREGVSGIS
SSDGNTYYADSVKGRFTISSDNAKNTVYLQMNSLKPEDTAVYYCAAEPPDSSWYLD
GSPEFFKYWGQGTQVTVSSDAHKSEVAHRFKDLGEENFKALVLIAFAQYLQQCPFE
DHVKLVNEVTEFAKTCVADESAENCDKSLHTLFGDKLCTVATLRETYGEMADCCA
KQEPERNECFLQHKDDNPNLPRLVRPEVDVMCTAFHDNEETFLKKYLYEIARRHPYF
YAPELLFFAKRYKAAFTECCQAADKAACLLPKLDELRDEGKASSAKQRLKCASLQK
FGERAFKAWAVARLSQRFPKAEFAEVSKLVTDLTKVHTECCHGDLLECADDRADLA
KYICENQDSISSKLKECCEKPLLEKSHCIAEVENDEMPADLPSLAADFVESKDVCKNY
AEAKDVFLGMFLYEYARRHPDYSVVLLLRLAKTYETTLEKCCAAADPHECYAKVF
DEFKPLVEEPQNLIKQNCELFEQLGEYKFQNALLVRYTKKVPQVSTPTLVEVSRNLG
KVGSKCCKHPEAKRMPCAEDYLSVVLNQLCVLHEKTPVSDRVTKCCTESLVNRRPC
FSALEVDETYVPKEFNAETFTFHADICTLSEKERQIKKQTALVELVKHKPKATKEQLK
AVMDDFAAFVEKCCKADDKETCFAEEGKKLVAASQAALGL
< IL6R201-HSA, SEQ ID NO: 605“; PRT; ->”
EVQLVESGGGLVQPGGSLRLSCAASGFTFSDYDIGWFRQAPGKGREGVSGISS
SDGNTYYADSVKGRFTISRDNAKNTLYLQMNSLRPEDTAVYYCAAEPPDSSWYLDG
SPEFFKYWGQGTLVTVSSDAHKSEVAHRFKDLGEENFKALVLIAFAQYLQQCPFEDH
VKLVNEVTEFAKTCVADESAENCDKSLHTLFGDKLCTVATLRETYGEMADCCAKQ
EPERNECFLQHKDDNPNLPRLVRPEVDVMCTAFHDNEETFLKKYLYEIARRHPYFYA
PELLFFAKRYKAAFTECCQAADKAACLLPKLDELRDEGKASSAKQRLKCASLQKFG
ERAFKAWAVARLSQRFPKAEFAEVSKLVTDLTKVHTECCHGDLLECADDRADLAK
YICENQDSISSKLKECCEKPLLEKSHCIAEVENDEMPADLPSLAADFVESKDVCKNYA
EAKDVFLGMFLYEYARRHPDYSVVLLLRLAKTYETTLEKCCAAADPHECYAKVFDE
FKPLVEEPQNLIKQNCELFEQLGEYKFQNALLVRYTKKVPQVSTPTLVEVSRNLGKV
GSKCCKHPEAKRMPCAEDYLSVVLNQLCVLHEKTPVSDRVTKCCTESLVNRRPCFS
ALEVDETYVPKEFNAETFTFHADICTLSEKERQIKKQTALVELVKHKPKATKEQLKA
VMDDFAAFVEKCCKADDKETCFAEEGKKLVAASQAALGL
< IL6R201-9GS-IL6R201-HSA, SEQ ID NO: 606“; PRT; ->”
EVQLVESGGGLVQPGGSLRLSCAASGFTFSDYDIGWFRQAPGKGREGVSGISS
SDGNTYYADSVKGRFTISRDNAKNTLYLQMNSLRPEDTAVYYCAAEPPDSSWYLDG
SPEFFKYWGQGTLVTVSSGGGGSGGGSEVQLVESGGGLVQPGGSLRLSCAASGFTFS
DYDIGWFRQAPGKGREGVSGISSSDGNTYYADSVKGRFTISRDNAKNTLYLQMNSL
RPEDTAVYYCAAEPPDSSWYLDGSPEFFKYWGQGTLVTVSSDAHKSEVAHRFKDLG
EENFKALVLIAFAQYLQQCPFEDHVKLVNEVTEFAKTCVADESAENCDKSLHTLFGD
KLCTVATLRETYGEMADCCAKQEPERNECFLQHKDDNPNLPRLVRPEVDVMCTAF
HDNEETFLKKYLYEIARRHPYFYAPELLFFAKRYKAAFTECCQAADKAACLLPKLDE
LRDEGKASSAKQRLKCASLQKFGERAFKAWAVARLSQRFPKAEFAEVSKLVTDLTK
VHTECCHGDLLECADDRADLAKYICENQDSISSKLKECCEKPLLEKSHCIAEVENDE
MPADLPSLAADFVESKDVCKNYAEAKDVFLGMFLYEYARRHPDYSVVLLLRLAKT
YETTLEKCCAAADPHECYAKVFDEFKPLVEEPQNLIKQNCELFEQLGEYKFQNALLV
RYTKKVPQVSTPTLVEVSRNLGKVGSKCCKHPEAKRMPCAEDYLSVVLNQLCVLHE
KTPVSDRVTKCCTESLVNRRPCFSALEVDETYVPKEFNAETFTFHADICTLSEKERQI
KKQTALVELVKHKPKATKEQLKAVMDDFAAFVEKCCKADDKETCFAEEGKKLVA
ASQAALGL
< IL6R201-20GS-IL6R201-HSA, SEQ ID NO: 607“; PRT; ->”
EVQLVESGGGLVQPGGSLRLSCAASGFTFSDYDIGWFRQAPGKGREGVSGISS
SDGNTYYADSVKGRFTISRDNAKNTLYLQMNSLRPEDTAVYYCAAEPPDSSWYLDG
SPEFFKYWGQGTLVTVSSGGGGSGGGGSGGGGSGGGGSEVQLVESGGGLVQPGGSL
RLSCAASGFTFSDYDIGWFRQAPGKGREGVSGISSSDGNTYYADSVKGRFTISRDNA
KNTLYLQMNSLRPEDTAVYYCAAEPPDSSWYLDGSPEFFKYWGQGTLVTVSSDAH
KSEVAHRFKDLGEENFKALVLIAFAQYLQQCPFEDHVKLVNEVTEFAKTCVADESA
ENCDKSLHTLFGDKLCTVATLRETYGEMADCCAKQEPERNECFLQHKDDNPNLPRL
VRPEVDVMCTAFHDNEETFLKKYLYEIARRHPYFYAPELLFFAKRYKAAFTECCQA
ADKAACLLPKLDELRDEGKASSAKQRLKCASLQKFGERAFKAWAVARLSQRFPKAE
FAEVSKLVTDLTKVHTECCHGDLLECADDRADLAKYICENQDSISSKLKECCEKPLL
EKSHCIAEVENDEMPADLPSLAADFVESKDVCKNYAEAKDVFLGMFLYEYARRHPD
YSVVLLLRLAKTYETTLEKCCAAADPHECYAKVFDEFKPLVEEPQNLIKQNCELFEQ
LGEYKFQNALLVRYTKKVPQVSTPTLVEVSRNLGKVGSKCCKHPEAKRMPCAEDYL
SVVLNQLCVLHEKTPVSDRVTKCCTESLVNRRPCFSALEVDETYVPKEFNAETFTFH
ADICTLSEKERQIKKQTALVELVKHKPKATKEQLKAVMDDFAAFVEKCCKADDKET
CFAEEGKKLV
< IL6R201-AAA-IL6R201-HSA, SEQ ID NO: 608“; PRT; ->”
EVQLVESGGGLVQPGGSLRLSCAASGFTFSDYDIGWFRQAPGKGREGVSGISS
SDGNTYYADSVKGRFTISRDNAKNTLYLQMNSLRPEDTAVYYCAAEPPDSSWYLDG
SPEFFKYWGQGTLVTVSSAAAEVQLVESGGGLVQPGGSLRLSCAASGFTFSDYDIGW
FRQAPGKGREGVSGISSSDGNTYYADSVKGRFTISRDNAKNTLYLQMNSLRPEDTAV
YYCAAEPPDSSWYLDGSPEFFKYWGQGTLVTVSSDAHKSEVAHRFKDLGEENFKAL
VLIAFAQYLQQCPFEDHVKLVNEVTEFAKTCVADESAENCDKSLHTLFGDKLCTVA
TLRETYGEMADCCAKQEPERNECFLQHKDDNPNLPRLVRPEVDVMCTAFHDNEETF
LKKYLYEIARRHPYFYAPELLFFAKRYKAAFTECCQAADKAACLLPKLDELRDEGK
ASSAKQRLKCASLQKFGERAFKAWAVARLSQRFPKAEFAEVSKLVTDLTKVHTECC
HGDLLECADDRADLAKYICENQDSISSKLKECCEKPLLEKSHCIAEVENDEMPADLPS
LAADFVESKDVCKNYAEAKDVFLGMFLYEYARRHPDYSVVLLLRLAKTYETTLEKC
CAAADPHECYAKVFDEFKPLVEEPQNLIKQNCELFEQLGEYKFQNALLVRYTKKVP
QVSTPTLVEVSRNLGKVGSKCCKHPEAKRMPCAEDYLSVVLNQLCVLHEKTPVSDR
VTKCCTESLVNRRPCFSALEVDETYVPKEFNAETFTFHADICTLSEKERQIKKQTALV
ELVKHKPKATKEQLKAVMDDFAAFVEKCCKADDKETCFAEEGKKLVAASQAALGL
< IL6R61, SEQ ID NO: 609“; PRT; ->”
EVQLVESGGGLVQPGGSLRLSCAASGSIFKVNAMGWYRQAPGKGRELVAGII
SGGSTNYADSVKGRLTISRDNAKNTVYLQMNSLRPEDTAVYYCSFVTTNSDYDLGR
DYWGQGTLVTVSS
< IL6R62, SEQ ID NO: 610“; PRT; ->”
EVQLVESGGGLVQPGGSLRLSCAASGSIFKVNAMGWYRQAPGKGRELVAGII
SGGSTNYADSVKGRFTISRDNAKNTVYLQMNSLRPEDTAVYYCSFVTTNSDYDLGR
DYWGQGTLVTVSS
< IL6R63, SEQ ID NO: 611“; PRT; ->”
EVQLVESGGGLVQPGGSLRLSCAASGSIFKVNAMGWYRQAPGKGRELVAGII
SGGSTNYADSVKGRLTISRDNAKNTLYLQMNSLRPEDTAVYYCSFVTTNSDYDLGR
DYWGQGTLVTVSS
< IL6R64, SEQ ID NO: 612“; PRT; ->”
EVQLVESGGGLVQPGGSLRLSCAASGSIFKVNAMGWYRQAPGKGRELVAGII
SGGSTNYADSVKGRLTISRDNAKNTVYLQMNSLRPEDTAVYYCAFVTTNSDYDLGR
DYWGQGTLVTVSS
< IL6R65, SEQ ID NO: 613“; PRT; ->”
EVQLVESGGGLVQPGGSLRLSCAASGSIFKVNAMGWYRQAPGKGRELVAGII
SGGSTNYADSVKGRFTISRDNAKNTLYLQMNSLRPEDTAVYYCAFVTTNSDYDLGR
DYWGQGTLVTVSS
< IL6R71, SEQ ID NO: 614“; PRT; ->”
EVQLVESGGGLVQPGGSLRLSCAASGFTFDDYDIGWFRQAPGKGREGVSGIS
SSDGNTYYADSVKGRFTISSDNAKNTVYLQMNSLRPEDTAVYYCAAEPPDSSWYLD
GSPEFFKYWGQGTLVTVSS
< IL6R72, SEQ ID NO: 615“; PRT; ->”
EVQLVESGGGLVQPGGSLRLSCAASGFTFSDYDIGWFRQAPGKGREGVSGISS
SDGNTYYADSVKGRFTISSDNAKNTVYLQMNSLRPEDTAVYYCAAEPPDSSWYLDG
SPEFFKYWGQGTLVTVSS
< IL6R73, SEQ ID NO: 616“; PRT; ->”
EVQLVESGGGLVQPGGSLRLSCAASGFTFDDYDIGWFRQAPGKGREGVSGIS
SSDGNTYYADSVKGRFTISRDNAKNTVYLQMNSLRPEDTAVYYCAAEPPDSSWYLD
GSPEFFKYWGQGTLVTVSS
< IL6R74, SEQ ID NO: 617“; PRT; ->”
EVQLVESGGGLVQPGGSLRLSCAASGFTFDDYDIGWFRQAPGKGREGVSGIS
SSDGNTYYADSVKGRFTISSDNAKNTLYLQMNSLRPEDTAVYYCAAEPPDSSWYLD
GSPEFFKYWGQGTLVTVSS
< IL6R75, SEQ ID NO: 618“; PRT; ->”
EVQLVESGGGLVQPGGSLRLSCAASGFTFSDYDIGWFRQAPGKGREGVSGISS
SDGNTYYADSVKGRFTISRDNAKNTLYLQMNSLRPEDTAVYYCAAEPPDSSWYLDG
SPEFFKYWGQGTLVTVSS
< IL6R81, SEQ ID NO: 619“; PRT; ->”
EVQLVESGGGLVQPGGSLRLSCAASGFTFDDYGMSWVRQAPGRATEWVSAI
SWNGNNTYYTESMKGRFTISRDNAKNTVYLQMNSLRPEDTAVYYCVKGSTAIVGVP
PTYPDEYDYWGQGTLVTVSS
< IL6R82, SEQ ID NO: 620“; PRT; ->”
EVQLVESGGGLVQPGGSLRLSCAASGFTFDDYGMSWVRQAPGKGLEWVSAI
SWNGNNTYYTESMKGRFTISRDNAKNTVYLQMNSLRPEDTAVYYCVKGSTAIVGVP
PTYPDEYDYWGQGTLVTVSS
< IL6R83, SEQ ID NO: 621“; PRT; ->”
EVQLVESGGGLVQPGGSLRLSCAASGFTFDDYGMSWVRQAPGRATEWVSAI
SWNGNNTYYTESMKGRFTISRDNAKNTLYLQMNSLRPEDTAVYYCVKGSTAIVGVP
PTYPDEYDYWGQGTLVTVSS
< IL6R84, SEQ ID NO: 622“; PRT; ->”
EVQLVESGGGLVQPGGSLRLSCAASGFTFDDYGMSWVRQAPGKGLEWVSAI
SWNGNNTYYTESMKGRFTISRDNAKNTLYLQMNSLRPEDTAVYYCVKGSTAIVGVP
PTYPDEYDYWGQGTLVTVSS
< IL6R85, SEQ ID NO: 623“; PRT; ->”
EVQLVESGGGLVQPGGSLRLSCAASGFTFDDYGMSWVRQAPGRGLEWVSAI
SWNGNNTYYTESMKGRFTISRDNAKNTLYLQMNSLRPEDTAVYYCVKGSTAIVGVP
PTYPDEYDYWGQGTLVTVSS
< IL6R86, SEQ ID NO: 624“; PRT; ->”
EVQLVESGGGLVQPGGSLRLSCAASGFTFDDYGMSWVRQAPGRALEWVSAI
SWNGNNTYYTESMKGRFTISRDNAKNTLYLQMNSLRPEDTAVYYCVKGSTAIVGVP
PTYPDEYDYWGQGTLVTVSS
< IL6R87, SEQ ID NO: 625“; PRT; ->”
EVQLVESGGGLVQPGGSLRLSCAASGFTFDDYGMSWVRQAPGKATEWVSAI
SWNGNNTYYTESMKGRFTISRDNAKNTLYLQMNSLRPEDTAVYYCVKGSTAIVGVP
PTYPDEYDYWGQGTLVTVSS
< IL6R88, SEQ ID NO: 626“; PRT; ->”
EVQLVESGGGLVQPGGSLRLSCAASGFTFDDYGMSWVRQAPGKGTEWVSAI
SWNGNNTYYTESMKGRFTISRDNAKNTLYLQMNSLRPEDTAVYYCVKGSTAIVGVP
PTYPDEYDYWGQGTLVTVSS
< IL6R89, SEQ ID NO: 627“; PRT; ->”
EVQLVESGGGLVQPGGSLRLSCAASGFTFDDYGMSWVRQAPGRGTEWVSAI
SWNGNNTYYTESMKGRFTISRDNAKNTLYLQMNSLRPEDTAVYYCVKGSTAIVGVP
PTYPDEYDYWGQGTLVTVSS
< IL6R90, SEQ ID NO: 628“; PRT; ->”
EVQLVESGGGLVQPGGSLRLSCAASGFTFDDYGMSWVRQAPGKALEWVSAI
SWNGNNTYYTESMKGRFTISRDNAKNTLYLQMNSLRPEDTAVYYCVKGSTAIVGVP
PTYPDEYDYWGQGTLVTVSS
< REFERENCE IGG HEAVY CHAIN, SEQ ID NO: 629“; PRT; ->”
QVQLQESGPGLVRPSQTLSLTCTVSGYSITSDHAWSWVRQPPGRGLEWIGYIS
YSGITTYNPSLKSRVTMLRDTSKNQFSLRLSSVTAADTAVYYCARSLARTTAMDYW
GQGSLVTVSSASTKGPSVFPLAPSSKSTSGGTAALGCLVKDYFPEPVTVSWNSGALTS
GVHTFPAVLQSSGLYSLSSVVTVPSSSLGTQTYICNVNHKPSNTKVDKKVEPKSCDK
THTCPPCPAPELLGGPSVFLFPPKPKDTLMISRTPEVTCVVVDVSHEDPEVKFNWYVD
GVEVHNAKTKPREEQYNSTYRVVSVLTVLHQDWLNGKEYKCKVSNKALPAPIEKTI
SKAKGQPREPQVYTLPPSRDELTKNQVSLTCLVKGFYPSDIAVEWESNGQPENNYKT
TPPVLDSDGSFFLYSKLTVDKSRWQQGNVFSCSVMHEALHNHYTQKSLSLSPGK
< REFERENCE IGG LIGHT CHAIN, SEQ ID NO: 630“; PRT; ->”
[sequence omitted]
< REFERENCE FAB HEAVY CHAIN, SEQ ID NO: 631“; PRT; ->”
QVQLQESGPGLVRPSQTLSLTCTVSGYSITSDHAWSWVRQPPGRGLEWIGYIS
YSGITTYNPSLKSRVTMLRDTSKNQFSLRLSSVTAADTAVYYCARSLARTTAMDYW
GQGSLVTVSSASTKGPSVFPLAPSSKSTSGGTAALGCLVKDYFPEPVTVSWNSGALTS
GVHTFPAVLQSSGLYSLSSVVTVPSSSLGTQTYICNVNHKPSNTKVDKKVEPKSC
< REFERENCE FAB LIGHT CHAIN, SEQ ID NO: 632“; PRT; ->”
[sequence omitted]
< IL6R MACACA FASCICULARIS, SEQ ID NO: 633“; PRT; ->”
LAPGGCPAQEVARGVLTSLPGDSVTLTCPGGEPEDNATVHWVLRKPAEGSHL
SRWAGVGRRLLLRSVQLHDSGNYSCYRAGRPAATVHLLVDVPPEEPQLSCFRKSPLS
NVVCEWGPRSTPSPTTKAVLLVRKFQNSPAEDFQEPCQYSQESQKFSCQLAVPEGDS
SFYIVSMCVASSVGSKLSKTQTFQGCGILQPDPPANITVTAVARNPRWLSVTWQDPH
SWNSSFYRLRFELRYRAERSKTFTTWMVKDLQHHCVIHDAWSGLRHVVQLRAQEE
FGQGEWSEWSPEAMGTPWTESRSPPAENEVSTPTQAPTTNKDDDNILSGDSANATSL
PVQD

“(t)” refers to a translated protein. Leader sequences and N-terminal sequences are given as SEQ ID NO's: 472-477.

[1033] The term and expressions which have been employed are used as terms of description and not of limitation, and there is no intention in the use of such terms and expressions of excluding any equivalents of the features shown and described or portions thereof, it being recognized that various modifications are possible within the scope of the invention.

[1034] All of the references described herein are incorporated by reference, in particular of the teaching that is referenced hereinabove.

The application's sequence listing, which the Patent Office published only in electronic form, follows.

SEQUENCE LISTING (633 sequences)

SEQ ID NO: 1 - protein, 26 aa, Artificial
  FR1
  misc_feature (11)..(11): Hallmark residue: L, M, S, V or W; preferably L
QVQLQESGGGXVQAGGSLRLSCAASG

SEQ ID NO: 2 - protein, 14 aa, Artificial
  FR2
  misc_feature (2)..(2): Hallmark residue: F, H, I, L, Y or V; preferably F or V
  misc_feature (9)..(9): Hallmark residue: G, E, A, D, Q, R, S or L; preferably G, E or Q; most preferably G or E
  misc_feature (10)..(10): Hallmark residue: L, R, C, I, L, P, Q or V; preferably L or R
  misc_feature (12)..(12): Hallmark residue: W, L, F, A, G, I, M, R, S, V or Y; preferably W, L, F or R
WXRQAPGKXXEXVA

SEQ ID NO: 3 - protein, 32 aa, Artificial
  FR3
  misc_feature (21)..(21): Hallmark residue: R, K, N, E, G, I, M, Q or T; preferably K or R; most preferably R
  misc_feature (22)..(22): Hallmark residue: P, A, D, L, R, S, T or V; preferably P
RFTISRDNAKNTVYLQMNSLXXEDTAVYYCAA

SEQ ID NO: 4 - protein, 11 aa, Artificial
  FR4
  misc_feature (1)..(1): Hallmark residue: W, P, R or S; preferably W
  misc_feature (2)..(2): Hallmark residue: G or D; preferably G
  misc_feature (6)..(6): Hallmark residue: Q, L or R; preferably Q or L
XXQGTXVTVSS

SEQ ID NO: 5 - protein, 26 aa, Artificial
  FR1
QVQLQESGGGLVQAGGSLRLSCAASG

SEQ ID NO: 6 - protein, 14 aa, Artificial
  FR2
WFRQAPGKERELVA

SEQ ID NO: 7 - protein, 14 aa, Artificial
  FR2
WFRQAPGKEREFVA

SEQ ID NO: 8 - protein, 13 aa, Artificial
  FR2
WFRQAPGKEREGA

SEQ ID NO: 9 - protein, 14 aa, Artificial
  FR2
WFRQAPGKQRELVA

SEQ ID NO: 10 - protein, 14 aa, Artificial
  FR2
WFRQAPGKQREFVA

SEQ ID NO: 11 - protein, 13 aa, Artificial
  FR2
WYRQAPGKGLEWA

SEQ ID NO: 12 - protein, 32 aa, Artificial
  FR3
RFTISRDNAKNTVYLQMNSLKPEDTAVYYCAA

SEQ ID NO: 13 - protein, 11 aa, Artificial
  FR4
WGQGTQVTVSS

SEQ ID NO: 14 - protein, 11 aa, Artificial
  FR4
WGQGTLVTVSS

SEQ ID NO: 15 - protein, 5 aa, Artificial
  CDR1
SFGMS

SEQ ID NO: 16 - protein, 5 aa, Artificial
  CDR1
LNLMG

SEQ ID NO: 17 - protein, 5 aa, Artificial
  CDR1
INLLG

SEQ ID NO: 18 - protein, 5 aa, Artificial
  CDR1
NYWMY

SEQ ID NO: 19 - protein, 17 aa, Artificial
  CDR2
SISGSGSDTLYADSVKG

SEQ ID NO: 20 - protein, 16 aa, Artificial
  CDR2
TITVGDSTNYADSVKG

SEQ ID NO: 21 - protein, 16 aa, Artificial
  CDR2
TITVGDSTSYADSVKG

SEQ ID NO: 22 - protein, 17 aa, Artificial
  CDR2
SINGRGDDTRYADSVKG

SEQ ID NO: 23 - protein, 17 aa, Artificial
  CDR2
AISADSSTKNYADSVKG

SEQ ID NO: 24 - protein, 17 aa, Artificial
  CDR2
AISADSSDKRYADSVKG

SEQ ID NO: 25 - protein, 17 aa, Artificial
  CDR2
RISTGGGYSYYADSVKG

SEQ ID NO: 26 - protein, 13 aa, Artificial
  CDR3
DREAQVDTLDFDY

SEQ ID NO: 27 - protein, 6 aa, Artificial
  CDR3
GGSLSR

SEQ ID NO: 28 - protein, 8 aa, Artificial
  CDR3
RRTWHSEL

SEQ ID NO: 29 - protein, 7 aa, Artificial
  CDR3
GRSVSRS

SEQ ID NO: 30 - protein, 5 aa, Artificial
  CDR3
GRGSP

SEQ ID NO: 31 - protein, 17 aa, Artificial
  myc-tag
AAAEQKLISEEDLNGAA

SEQ ID NO: 32 - protein, 115 aa, Artificial [sequence omitted]

SEQ ID NO: 33 - protein, 115 aa, Artificial [sequence omitted]

SEQ ID NO: 34 - protein, 117 aa, Artificial
  Nanobody
AVQLVESGGGLVQGGGSLRLACAASERIFDLNLMGWYRQGPGNERELVATCITVGDSTNYADSVKGRFTISMDYTKQTVYLHMNSLRPEDTGLYYCKIRRTWHSELWGQGTQVTVSS

SEQ ID NO: 35 - protein, 125 aa, Artificial
  Nanobody
EVQLQASGGGLVQAGGSLRLSCSASVRTFSIYAMGWFRQAPGKEREFVAGINRSGDVTKYADFVKGRFSISRDNAKNMVYLQMNSLKPEDTALYYCAATWAYDTVGALTSGYNFWGQGTQVTVSS

SEQ ID NO: 36 - protein, 122 aa, Artificial
  Nanobody
EVQLQASGGGLVQAGGSLRLSCAASGFKITHYTMGWFRQAPGKEREFVSRITWGGDNTFYSNSVKGRFTISRDNAKNTVYLQMNSLKPEDTADYYCAAGSTSTATPLRVDYWGKGTQVTVSS

SEQ ID NO: 37 - protein, 30 aa, Artificial
  linker
GGGGSGGGGSGGGGSGGGGSGGGGSGGGGS

SEQ ID NO: 38 - protein, 15 aa, Artificial
  linker
GGGGSGGGGSGGGGS

SEQ ID NO: 39 - protein, 9 aa, Artificial
  linker
GGGGSGGGS

SEQ ID NO: 40 - protein, 7 aa, Artificial
  linker
SGGSGGS

SEQ ID NO: 41 - protein, 12 aa, Artificial
  linker
EPKTPKPQPAAA

SEQ ID NO: 42 - protein, 30 aa, Artificial
  FR or CDR or nanobody sequence
EVQLVESGGGLVQPGGSLRLSCAASGFSLD

SEQ ID NO: 43 - protein, 30 aa, Artificial; identical to SEQ ID NO: 42
  FR or CDR or nanobody sequence

SEQ ID NO: 44 - protein, 30 aa, Artificial
  FR or CDR or nanobody sequence
EVQLVESGGGLVQPGGSLRLSCAASGFTLD

SEQ ID NO: 45 - protein, 30 aa, Artificial; identical to SEQ ID NO: 44
  FR or CDR or nanobody sequence

SEQ ID NO: 46 - protein, 30 aa, Artificial
  FR or CDR or nanobody sequence
EVQLVESGGGLVQPGGSLRLSCVASGFSLD

SEQ ID NO: 47 - protein, 30 aa, Artificial
  FR or CDR or nanobody sequence
EVQLVESGGGLVQPGGSLRLSCAASGFTLG

SEQ ID NO: 48 - protein, 30 aa, Artificial; identical to SEQ ID NO: 47
  FR or CDR or nanobody sequence

SEQ ID NO: 49 - protein, 30 aa, Artificial
  FR or CDR or nanobody sequence
EVQLVESGGGLVQPGGSLRLSCAASGFTFD

SEQ ID NO: 50 - protein, 30 aa, Artificial; identical to SEQ ID NO: 42
  FR or CDR or nanobody sequence

SEQ ID NO: 51 - protein, 30 aa, Artificial
  FR or CDR or nanobody sequence
EVQLVESGGGLVQPGGSLRLSCAASGFTFG

SEQ ID NO: 52 - protein, 30 aa, Artificial
  FR or CDR or nanobody sequence
EVQLVESGGGLVQAGGSLRLSCAASGFTFD

SEQ ID NO: 53 - protein, 30 aa, Artificial; identical to SEQ ID NO: 51
  FR or CDR or nanobody sequence

SEQ ID NO: 54 - protein, 30 aa, Artificial; identical to SEQ ID NO: 52
  FR or CDR or nanobody sequence

SEQ ID NO: 55 - protein, 30 aa, Artificial; identical to SEQ ID NO: 51
  FR or CDR or nanobody sequence

SEQ ID NO: 56 - protein, 30 aa, Artificial; identical to SEQ ID NO: 52
  FR or CDR or nanobody sequence

SEQ ID NO: 57 - protein, 30 aa, Artificial; identical to SEQ ID NO: 51
  FR or CDR or nanobody sequence

SEQ ID NO: 58 - protein, 30 aa, Artificial; identical to SEQ ID NO: 51
  FR or CDR or nanobody sequence

SEQ ID NO: 59 - protein, 30 aa, Artificial; identical to SEQ ID NO: 46
  FR or CDR or nanobody sequence

SEQ ID NO: 60 - protein, 30 aa, Artificial; identical to SEQ ID NO: 44
  FR or CDR or nanobody sequence

SEQ ID NO: 61 - protein, 30 aa, Artificial; identical to SEQ ID NO: 44
  FR or CDR or nanobody sequence

SEQ ID NO: 62 - protein, 30 aa, Artificial; identical to SEQ ID NO: 44
  FR or CDR or nanobody sequence

SEQ ID NO: 63 - protein, 30 aa, Artificial; identical to SEQ ID NO: 49
  FR or CDR or nanobody sequence

SEQ ID NO: 64 - protein, 30 aa, Artificial; identical to SEQ ID NO: 51
  FR or CDR or nanobody sequence

SEQ ID NO: 65 - protein, 30 aa, Artificial; identical to SEQ ID NO: 51
  FR or CDR or nanobody sequence

SEQ ID NO: 66 - protein, 30 aa, Artificial; identical to SEQ ID NO: 51
  FR or CDR or nanobody sequence

SEQ ID NO: 67 - protein, 30 aa, Artificial; identical to SEQ ID NO: 51
  FR or CDR or nanobody sequence

SEQ ID NO: 68 - protein, 30 aa, Artificial
  FR or CDR or nanobody sequence
EVQLVESGGGLVQPGGSLRLSCAASGFTLN

SEQ ID NO: 69 - protein, 30 aa, Artificial; identical to SEQ ID NO: 51
  FR or CDR or nanobody sequence

SEQ ID NO: 70 - protein, 30 aa, Artificial; identical to SEQ ID NO: 42
  FR or CDR or nanobody sequence

SEQ ID NO: 71 - protein, 30 aa, Artificial; identical to SEQ ID NO: 49
  FR or CDR or nanobody sequence

SEQ ID NO: 72 - protein, 30 aa, Artificial
  FR or CDR or nanobody sequence
EVQLVESGGGLVQAGGSLRLSCAASGRTFS

SEQ ID NO: 73 - protein, 30 aa, Artificial; identical to SEQ ID NO: 52
  FR or CDR or nanobody sequence

SEQ ID NO: 74 - protein, 30 aa, Artificial; identical to SEQ ID NO: 72
  FR or CDR or nanobody sequence

SEQ ID NO: 75 - protein, 30 aa, Artificial
  FR or CDR or nanobody sequence
EVQLVESGGGLVQAGGSLRLSCAASGRTSS

SEQ ID NO: 76 - protein, 30 aa, Artificial; identical to SEQ ID NO: 44
  FR or CDR or nanobody sequence

SEQ ID NO: 77 - protein, 30 aa, Artificial; identical to SEQ ID NO: 72
  FR or CDR or nanobody sequence

SEQ ID NO: 78 - protein, 30 aa, Artificial
  FR or CDR or nanobody sequence
EVQLVESGGGLVQPGGSLRLSCAAAGFTLD

SEQ ID NO: 79 - protein, 30 aa, Artificial; identical to SEQ ID NO: 46
  FR or CDR or nanobody sequence

SEQ ID NO: 80 - protein, 30 aa, Artificial; identical to SEQ ID NO: 44
  FR or CDR or nanobody sequence

SEQ ID NO: 81 - protein, 30 aa, Artificial
  FR or CDR or nanobody sequence
EVQLVESGGGLVQAGGSLRLSCAASGNIFD

SEQ ID NO: 82 - protein, 30 aa, Artificial; identical to SEQ ID NO: 51
  FR or CDR or nanobody sequence

SEQ ID NO: 83 - protein, 30 aa, Artificial; identical to SEQ ID NO: 52
  FR or CDR or nanobody sequence

SEQ ID NO: 84 - protein, 30 aa, Artificial
  FR or CDR or nanobody sequence
EVQLVESGGGLVQAGGSLRLSCAASGSIFK

SEQ ID NO: 85 - protein, 30 aa, Artificial; identical to SEQ ID NO: 72
  FR or CDR or nanobody sequence

SEQ ID NO: 86 - protein, 30 aa, Artificial
  FR or CDR or nanobody sequence
EVQLVESGGGLVQAGGSLRLSCTASGNIFS

SEQ ID NO: 87 - protein, 30 aa, Artificial
  FR or CDR or nanobody sequence
EVQLVESGGGFVQAGGSLRLSCIASGDNFS

SEQ ID NO: 88 - protein, 30 aa, Artificial; identical to SEQ ID NO: 72
  FR or CDR or nanobody sequence

SEQ ID NO: 89 - protein, 30 aa, Artificial
  FR or CDR or nanobody sequence
EVQLVESGGGLVQAGGSLRLSCAASGRTLS

SEQ ID NO: 90 - protein, 30 aa, Artificial; identical to SEQ ID NO: 44
  FR or CDR or nanobody sequence

SEQ ID NO: 91 - protein, 30 aa, Artificial; identical to SEQ ID NO: 72
  FR or CDR or nanobody sequence

SEQ ID NO: 92 - protein, 30 aa, Artificial
  FR or CDR or nanobody sequence
EVQLVESGGGLVQAGGSLRLSCAASGLTDD

SEQ ID NO: 93 - protein, 5 aa, Artificial
  FR or CDR or nanobody sequence
YYAIG

SEQ ID NO: 94 - protein, 5 aa, Artificial
  FR or CDR or nanobody sequence
YYAIG

SEQ ID NO: 95 - protein, 5 aa, Artificial
  FR or CDR or nanobody sequence
YYAIG

SEQ ID NO: 96 - protein, 5 aa, Artificial
  FR or CDR or nanobody sequence
YFAIG

SEQ ID NO: 97 - protein, 5 aa, Artificial
  FR or CDR or nanobody sequence
YYVIG

SEQ ID NO: 98 - protein, 5 aa, Artificial
  FR or CDR or nanobody sequence
YFAIG

SEQ ID NO: 99 - protein, 5 aa, Artificial
  FR or CDR or nanobody sequence
YFAIG

SEQ ID NO: 100 - protein, 5 aa, Artificial
  FR or CDR or nanobody sequence
DYGMS

SEQ ID NO: 101 - protein, 5 aa, Artificial
  FR or CDR or nanobody sequence
YYAIG

SEQ ID NO: 102 - protein, 5 aa, Artificial
  FR or CDR or nanobody sequence
SYDMS

SEQ ID NO: 103 - protein, 5 aa, Artificial
  FR or CDR or nanobody sequence
DYAIG

SEQ ID NO: 104 - protein, 5 aa, Artificial
  FR or CDR or nanobody sequence
SYDMS

SEQ ID NO: 105 - protein, 5 aa, Artificial
  FR or CDR or nanobody sequence
DYAIG

SEQ ID NO: 106 - protein, 5 aa, Artificial
  FR or CDR or nanobody sequence
SYDMS

SEQ ID NO: 107 - protein, 5 aa, Artificial
  FR or CDR or nanobody sequence
DYAIG

SEQ ID NO: 108 - protein, 5 aa, Artificial
  FR or CDR or nanobody sequence
SYDMS

SEQ ID NO: 109 - protein, 5 aa, Artificial
  FR or CDR or nanobody sequence
SYDMS

SEQ ID NO: 110 - protein, 5 aa, Artificial
  FR or CDR or nanobody sequence
YYVIG

SEQ ID NO: 111 - protein, 5 aa, Artificial
  FR or CDR or nanobody sequence
YYVIG

SEQ ID NO: 112 - protein, 5 aa, Artificial
  FR or CDR or nanobody sequence
YYAIG

SEQ ID NO: 113 - protein, 5 aa, Artificial
  FR or CDR or nanobody sequence
YYVIG

SEQ ID NO: 114 - protein, 5 aa, Artificial
  FR or CDR or nanobody sequence
DYGMS

SEQ ID NO: 115 - protein, 5 aa, Artificial
  FR or CDR or nanobody sequence
SYDMS

SEQ ID NO: 116 - protein, 5 aa, Artificial
  FR or CDR or nanobody sequence
SYDMS

SEQ ID NO: 117 - protein, 5 aa, Artificial
  FR or CDR or nanobody sequence
SYDMS

SEQ ID NO: 118 - protein, 5 aa, Artificial
  FR or CDR or nanobody sequence
SYDMS

SEQ ID NO: 119 - protein, 5 aa, Artificial
  FR or CDR or nanobody sequence
YYAIG

SEQ ID NO: 120 - protein, 5 aa, Artificial
  FR or CDR or nanobody sequence
SYDMS

SEQ ID NO: 121 - protein, 5 aa, Artificial
  FR or CDR or nanobody sequence
YYAIG

SEQ ID NO: 122 - protein, 5 aa, Artificial
  FR or CDR or nanobody sequence
DYGMS

SEQ ID NO: 123 - protein, 5 aa, Artificial
  FR or CDR or nanobody sequence
SYDMG

SEQ ID NO: 124 - protein, 5 aa, Artificial
  FR or CDR or nanobody sequence
DYAIG

SEQ ID NO: 125 - protein, 5 aa, Artificial
  FR or CDR or nanobody sequence
SYDMG

SEQ ID NO: 126 - protein, 5 aa, Artificial
  FR or CDR or nanobody sequence
SYDMT

SEQ ID NO: 127 - protein, 5 aa, Artificial
  FR or CDR or nanobody sequence
YYAIG

SEQ ID NO: 128 - protein, 5 aa, Artificial
  FR or CDR or nanobody sequence
SYAMG

SEQ ID NO: 129 - protein, 5 aa, Artificial
  FR or CDR or nanobody sequence
YSAIG

SEQ ID NO: 130 - protein, 5 aa, Artificial
  FR or CDR or nanobody sequence
YYVIG

SEQ ID NO: 131 - protein, 5 aa, Artificial
  FR or CDR or nanobody sequence
YGAIG

SEQ ID NO: 132 - protein, 7 aa, Artificial
  FR or CDR or nanobody sequence
DNTMGWT

SEQ ID NO: 133 - protein, 5 aa, Artificial
  FR or CDR or nanobody sequence
SYDMS

SEQ ID NO: 134 - protein, 5 aa, Artificial
  FR or CDR or nanobody sequence
DYDIG

SEQ ID NO: 135 - protein, 5 aa, Artificial
  FR or CDR or nanobody sequence
VNAMG

SEQ ID NO: 136 - protein, 5 aa, Artificial
  FR or CDR or nanobody sequence
SYDMG

SEQ ID NO: 137 - protein, 5 aa, Artificial
  FR or CDR or nanobody sequence
TETMG

SEQ ID NO: 138 - protein, 5 aa, Artificial
  FR or CDR or nanobody sequence
INRMG

SEQ ID NO: 139 - protein, 5 aa, Artificial
  FR or CDR or nanobody sequence
GADAG

SEQ ID NO: 140 - protein, 5 aa, Artificial
  FR or CDR or nanobody sequence
SYDMG

SEQ ID NO: 141 - protein, 5 aa, Artificial
  FR or CDR or nanobody sequence
SYAIG

SEQ ID NO: 142 - protein, 5 aa, Artificial
  FR or CDR or nanobody sequence
NIAMG

SEQ ID NO: 143 - protein, 5 aa, Artificial
  FR or CDR or nanobody sequence
DFAIG

SEQ ID NO: 144 - protein, 14 aa, Artificial
  FR or CDR or nanobody sequence
WFRQAPGKEREGVS

SEQ ID NO: 145 - protein, 14 aa, Artificial
  FR or CDR or nanobody sequence
WFRQAPGKEREGVS

SEQ ID NO: 146 - protein, 14 aa, Artificial
  FR or CDR or nanobody sequence
WFRQAPGKEREGVS

SEQ ID NO: 147 - protein, 14 aa, Artificial
  FR or CDR or nanobody sequence
WFRQAPGKERERVS

SEQ ID NO: 148 - protein, 14 aa, Artificial
  FR or CDR or nanobody sequence
WFRQAPGKEREGVS

SEQ ID NO: 149 - protein, 14 aa, Artificial
  FR or CDR or nanobody sequence
WFRQAPGKEREGVS

SEQ ID NO: 150 - protein, 14 aa, Artificial
  FR or CDR or nanobody sequence
WFRQAPGKEREGVS

SEQ ID NO: 151 - protein, 14 aa, Artificial
  FR or CDR or nanobody sequence
WVRQAPGKGLEWVS

SEQ ID NO: 152 - protein, 14 aa, Artificial
  FR or CDR or nanobody sequence
WFRQAPGKEREGVS

SEQ ID NO: 153 - protein, 14 aa, Artificial
  FR or CDR or nanobody sequence
WVRQAPGKGPEWVS

SEQ ID NO: 154 - protein, 14 aa, Artificial
  FR or CDR or nanobody sequence
WFRQAPGKEREGIS

SEQ ID NO: 155 - protein, 14 aa, Artificial
  FR or CDR or nanobody sequence
WVRQAPGKGPEWVS

SEQ ID NO: 156 - protein, 14 aa, Artificial
  FR or CDR or nanobody sequence
WFRQAPGKEREGVS

SEQ ID NO: 157 - protein, 14 aa, Artificial
  FR or CDR or nanobody sequence
WVRQAPGKGPEWVS

SEQ ID NO: 158 - protein, 14 aa, Artificial
  FR or CDR or nanobody sequence
WFRQAPGKEREGVS

SEQ ID NO: 159 - protein, 14 aa, Artificial
  FR or CDR or nanobody sequence
WVRQAPGKGPEWVS

SEQ ID NO: 160 - protein, 14 aa, Artificial
  FR or CDR or nanobody sequence
WVRQAPGKGPEWVS

SEQ ID NO: 161 - protein, 14 aa, Artificial
  FR or CDR or nanobody sequence
WFRQAPGKEREGVS

SEQ ID NO: 162 - protein, 14 aa, Artificial
  FR or CDR or nanobody sequence
WFRQAPGKEREAVA

SEQ ID NO: 163 - protein, 14 aa, Artificial
  FR or CDR or nanobody sequence
WWRQAPGKGREGVS

SEQ ID NO: 164 - protein, 14 aa, Artificial
  FR or CDR or nanobody sequence
WFRQAPGKEREGVS

SEQ ID NO: 165 - protein, 14 aa, Artificial
  FR or CDR or nanobody sequence
WVRQAPGKGLEWVS

SEQ ID NO: 166 - protein, 14 aa, Artificial
  FR or CDR or nanobody sequence
WVRQAPGKGPEWVS

SEQ ID NO: 167 - protein, 14 aa, Artificial
  FR or CDR or nanobody sequence
WVRQAPGKGPEWVS

SEQ ID NO: 168 - protein, 14 aa, Artificial
  FR or CDR or nanobody sequence
WVRQAPGKGPEWVS

SEQ ID NO: 169 - protein, 14 aa, Artificial
  FR or CDR or nanobody sequence
WVRQAPGKGPEWVS

SEQ ID NO: 170 - protein, 14 aa, Artificial
  FR or CDR or nanobody sequence
WFRQAPGKEREGVS

SEQ ID NO: 171 - protein, 14 aa, Artificial
  FR or CDR or nanobody sequence
WVRQAPGKGPEWVS

SEQ ID NO: 172 - protein, 14 aa, Artificial
  FR or CDR or nanobody sequence
WFRQAPGKEREGVS

SEQ ID NO: 173 - protein, 14 aa, Artificial
  FR or CDR or nanobody sequence
WVRQAPGRATEWVS

SEQ ID NO: 174 - protein, 14 aa, Artificial
  FR or CDR or nanobody sequence
WYRQAPGKEREFVA

SEQ ID NO: 175 - protein, 14 aa, Artificial
  FR or CDR or nanobody sequence
WFRQAPGKEHEGVS

SEQ ID NO: 176 - protein, 14 aa, Artificial
  FR or CDR or nanobody sequence
WYRQAPGKEREFVA

SEQ ID NO: 177 - protein, 14 aa, Artificial
  FR or CDR or nanobody sequence
WYRQVPGKEREFVA

SEQ ID NO: 178 - protein, 14 aa, Artificial
  FR or CDR or nanobody sequence
WFRQAPGKERERVS

SEQ ID NO: 179 - protein, 14 aa, Artificial
  FR or CDR or nanobody sequence
WGRQAPGKEREFVA

SEQ ID NO: 180 - protein, 14 aa, Artificial
  FR or CDR or nanobody sequence
WFRQAPGKEREMFS

SEQ ID NO: 181 - protein, 14 aa, Artificial
  FR or CDR or nanobody sequence
WFRQAPGKEREGVS

SEQ ID NO: 182 - protein, 14 aa, Artificial
  FR or CDR or nanobody sequence
WFRQAPGKEREGVS

SEQ ID NO: 183 - protein, 14 aa, Artificial
  FR or CDR or nanobody sequence
WNRQPPGKQRELVA

SEQ ID NO: 184 - protein, 14 aa, Artificial
  FR or CDR or nanobody sequence
WVRQAPGKGPEWVS

SEQ ID NO: 185 - protein, 14 aa, Artificial
  FR or CDR or nanobody sequence
WFRQAPGKEREGVS

SEQ ID NO: 186 - protein, 14 aa, Artificial
  FR or CDR or nanobody sequence
WYRQAPGKQRELVA

SEQ ID NO: 187 - protein, 14 aa, Artificial
  FR or CDR or nanobody sequence
WYRQAPGKEREFVA

SEQ ID NO: 188 - protein, 13 aa, Artificial
  FR or CDR or nanobody sequence
WYRQPPGKQRDVV

SEQ ID NO: 189 - protein, 14 aa, Artificial
  FR or CDR or nanobody sequence
WYRQALGKQRELVA

SEQ ID NO: 190 - protein, 14 aa, Artificial
  FR or CDR or nanobody sequence
WNRQTPGKEREFVA

SEQ ID NO: 191 - protein, 14 aa, Artificial
  FR or CDR or nanobody sequence
WYRQGPGKEREFVA

SEQ ID NO: 192 - protein, 14 aa, Artificial
  FR or CDR or nanobody sequence
WFRQAPGKEPEGVS

SEQ ID NO: 193 - protein, 14 aa, Artificial
  FR or CDR or nanobody sequence
WIREAPGKEREFVA

SEQ ID NO: 194 - protein, 14 aa, Artificial
  FR or CDR or nanobody sequence
WFRQAPGKEPEGVS

SEQ ID NO: 195 - protein, 19 aa, Artificial
  FR or CDR or nanobody sequence
CMDSSAGTTSTYYSDSVKG

SEQ ID NO: 196 - protein, 19 aa, Artificial
  FR or CDR or nanobody sequence
CMDSSDGTTNTYYSDSVKG

SEQ ID NO: 197 - protein, 17 aa, Artificial
  FR or CDR or nanobody sequence
CISSSDGSTYYADSVKG

SEQ ID NO: 198 - protein, 17 aa, Artificial
  FR or CDR or nanobody sequence
CISSSDGSTYYADSVKG

SEQ ID NO: 199 - protein, 17 aa, Artificial
  FR or CDR or nanobody sequence
CISSSDGSTYYADSVKG

SEQ ID NO: 200 - protein, 17 aa, Artificial
  FR or CDR or nanobody sequence
CISSSDGSTYYADSVKG

SEQ ID NO: 201 - protein, 17 aa, Artificial
  FR or CDR or nanobody sequence
CISSSDGSAYYADSVKG

SEQ ID NO: 202 - protein, 17 aa, Artificial
  FR or CDR or nanobody sequence
AISWNGGSTYYTESMKG

SEQ ID NO: 203 - protein, 19 aa, Artificial
  FR or CDR or nanobody sequence
CMDSSGGTTSTYYSDSVKG

SEQ ID NO: 204 - protein, 17 aa, Artificial
  FR or CDR or nanobody sequence
AINSGGGSTYYADSVKG

SEQ ID NO: 205 - protein, 17 aa, Artificial
  FR or CDR or nanobody sequence
CISSSDGSTYYADSVKG

SEQ ID NO: 206 - protein, 17 aa, Artificial
  FR or CDR or nanobody sequence
AINSGGGSTYYADSVKG

SEQ ID NO: 207 - protein, 17 aa, Artificial
  FR or CDR or nanobody sequence
GISSSDGNTYYADSVKG

SEQ ID NO: 208 - protein, 17 aa, Artificial
  FR or CDR or nanobody sequence
AINSGGGSTYYADSVKG

SEQ ID NO: 209 - protein, 17 aa, Artificial
  FR or CDR or nanobody sequence
CISSSDGSTYYADSVKG

SEQ ID NO: 210 - protein, 17 aa, Artificial
  FR or CDR or nanobody sequence
AINSGGGSTYYADSVKG

SEQ ID NO: 211 - protein, 17 aa, Artificial
  FR or CDR or nanobody sequence
AINSGGGSTYYADSVKG

SEQ ID NO: 212 - protein, 17 aa, Artificial
  FR or CDR or nanobody sequence
CISSSDGSTYYADSVKG

SEQ ID NO: 213 - protein, 17 aa, Artificial
  FR or CDR or nanobody sequence
CISSSDRSTYYADSVKG

SEQ ID NO: 214 - protein, 17 aa, Artificial
  FR or CDR or nanobody sequence
CISSGDGSTNYADSVKG

SEQ ID NO: 215 - protein, 17 aa, Artificial
  FR or CDR or nanobody sequence
CIGSSDDSTYYADSVKG

SEQ ID NO: 216 - protein, 17 aa, Artificial
  FR or CDR or nanobody sequence
AISWNGGSTYYTESMKG

SEQ ID NO: 217 - protein, 17 aa, Artificial
  FR or CDR or nanobody sequence
AINSGGGSTYYADSVKG

SEQ ID NO: 218 - protein, 17 aa, Artificial
  FR or CDR or nanobody sequence
AINSGGGSTYYADSVKG

SEQ ID NO: 219 - protein, 17 aa, Artificial
  FR or CDR or nanobody sequence
AINSGGGSTYYADSVKG

SEQ ID NO: 220 - protein, 17 aa, Artificial
  FR or CDR or nanobody sequence
AINSGGDNTYYADSVKG

SEQ ID NO: 221 - protein, 17 aa, Artificial
  FR or CDR or nanobody sequence
CISSSDGSTYYADSVKG

SEQ ID NO: 222 - protein, 17 aa, Artificial
  FR or CDR or nanobody sequence
AINSGGGSTYYADSVKG

SEQ ID NO: 223 - protein, 19 aa, Artificial
  FR or CDR or nanobody sequence
CMDSSSGTTSTYYSDSVKG

SEQ ID NO: 224 - protein, 17 aa, Artificial
  FR or CDR or nanobody sequence
AISWNGNNTYYTESMKG

SEQ ID NO: 225 - protein, 16 aa, Artificial
  FR or CDR or nanobody sequence
IITWNSSTYYADSVKG

SEQ ID NO: 226 - protein, 17 aa, Artificial
  FR or CDR or nanobody sequence
CISSSDGSTYYADSVKG

SEQ ID NO: 227 - protein, 17 aa, Artificial
  FR or CDR or nanobody sequence
VIHWSSGSTYYADPVKG

SEQ ID NO: 228 - protein, 17 aa, Artificial
  FR or CDR or nanobody sequence
VISWSGGSTYYADSVKG

SEQ ID NO: 229 - protein, 17 aa, Artificial
  FR or CDR or nanobody sequence
CISSSDGSTYYADSVKG

SEQ ID NO: 230 - protein, 17 aa, Artificial
  FR or CDR or nanobody sequence
TISWSGGSTYYADSVKG

SEQ ID NO: 231 - protein, 17 aa, Artificial
  FR or CDR or nanobody sequence
CISGSDGSTWYADSVAG

SEQ ID NO: 232 - protein, 17 aa, Artificial
  FR or CDR or nanobody sequence
CISSSDGSTYYADSVKG

SEQ ID NO: 233 - protein, 17 aa, Artificial
  FR or CDR or nanobody sequence
CISSSTGSTYYADSVKG

SEQ ID NO: 234 - protein, 16 aa, Artificial
  FR or CDR or nanobody sequence
IIATDGSTNYADSVKG

SEQ ID NO: 235 - protein, 17 aa, Artificial
  FR or CDR or nanobody sequence
AINSGGGSTYYADSVKG

SEQ ID NO: 236 - protein, 17 aa, Artificial
  FR or CDR or nanobody sequence
GISSSDGNTYYADSVKG

SEQ ID NO: 237 - protein, 16 aa, Artificial
  FR or CDR or nanobody sequence
GIISGGSTNYADSVKG

SEQ ID NO: 238 - protein, 17 aa, Artificial
  FR or CDR or nanobody sequence
VISRSGSSTYYADSVKG

SEQ ID NO: 239 - protein, 17 aa, Artificial
  FR or CDR or nanobody sequence
ATITHGGTTNYADSVKG

SEQ ID NO: 240 - protein, 16 aa, Artificial
  FR or CDR or nanobody sequence
IITNHGSTNYADAVKG

SEQ ID NO: 241 - protein, 17 aa, Artificial
  FR or CDR or nanobody sequence
AINWSGNSTYYADSVKG

SEQ ID NO: 242 - protein, 17 aa, Artificial
  FR or CDR or nanobody sequence
AISWSGGGTDYVDSVKG

SEQ ID NO: 243 - protein, 17 aa, Artificial
  FR or CDR or nanobody sequence
CISTSDGSTYYADSVKG

SEQ ID NO: 244 - protein, 17 aa, Artificial
  FR or CDR or nanobody sequence
ALTWSGGSTYYADSVKG

SEQ ID NO: 245 - protein, 17 aa, Artificial
  FR or CDR or nanobody sequence
CISSSDGSTYYADSVKG

SEQ ID NO: 246 - protein, 32 aa, Artificial
  FR or CDR or nanobody sequence
RFTISRDDAKNTVYLQMNSLKPEDTAVYYCAA

SEQ ID NO: 247 - protein, 32 aa, Artificial
  FR or CDR or nanobody sequence
RFTISRDDAKNTVYLQMNSLKPEDTASYYCAA

SEQ ID NO: 248 - protein, 32 aa, Artificial
  FR or CDR or nanobody sequence
RFTISRDNAKNTVYLQMNSLKPEDTAAYYCAT

SEQ ID NO: 249 - protein, 32 aa, Artificial
  FR or CDR or nanobody sequence
RFTISRDNAKNTVYLQMNSLKPEDTAVYYCAT

SEQ ID NO: 250 - protein, 32 aa, Artificial; identical to SEQ ID NO: 12
  FR or CDR or nanobody sequence

SEQ ID NO: 251 - protein, 32 aa, Artificial
  FR or CDR or nanobody sequence
RFTVSRDNAKNTVYLQMNSLKPEDTAVYYCAT

SEQ ID NO: 252 - protein, 32 aa, Artificial; identical to SEQ ID NO: 251
  FR or CDR or nanobody sequence

SEQ ID NO: 253 - protein, 32 aa, Artificial
  FR or CDR or nanobody sequence
RFTISRDNAKNTVYLQMNSLKPEDTAVYYCVK

SEQ ID NO: 254 - protein, 32 aa, Artificial; identical to SEQ ID NO: 246
  FR or CDR or nanobody sequence

SEQ ID NO: 255 - protein, 32 aa, Artificial
  FR or CDR or nanobody sequence
RFTISRDNAKNTLYLQMNSLKPEDTAVYYCAT

SEQ ID NO: 256 - protein, 32 aa, Artificial
  FR or CDR or nanobody sequence
RFTISSDNAKNTVYLQMNSLKPEDTAVYYCAA

SEQ ID NO: 257 - protein, 32 aa, Artificial; identical to SEQ ID NO: 255
  FR or CDR or nanobody sequence

SEQ ID NO: 258 - protein, 32 aa, Artificial; identical to SEQ ID NO: 256
  FR or CDR or nanobody sequence

SEQ ID NO: 259 - protein, 32 aa, Artificial; identical to SEQ ID NO: 255
  FR or CDR or nanobody sequence

SEQ ID NO: 260 - protein, 32 aa, Artificial
  FR or CDR or nanobody sequence
RFTISSDNAKNTVYLLMNSLKPEDTAVYYCAA

SEQ ID NO: 261 - protein, 32 aa, Artificial; identical to SEQ ID NO: 255
  FR or CDR or nanobody sequence

SEQ ID NO: 262 - protein, 32 aa, Artificial; identical to SEQ ID NO: 255
  FR or CDR or nanobody sequence

SEQ ID NO: 263 - protein, 32 aa, Artificial; identical to SEQ ID NO: 12
  FR or CDR or nanobody sequence

SEQ ID NO: 264 - protein, 32 aa, Artificial
  FR or CDR or nanobody sequence
RFTISRDNAKNTGYLQMNSLKPEDTAVYYCAA

SEQ ID NO: 265 - protein, 32 aa, Artificial; identical to SEQ ID NO: 249
  FR or CDR or nanobody sequence

SEQ ID NO: 266 - protein, 32 aa, Artificial; identical to SEQ ID NO: 12
  FR or CDR or nanobody sequence

SEQ ID NO: 267 - protein, 32 aa, Artificial; identical to SEQ ID NO: 253
  FR or CDR or nanobody sequence

SEQ ID NO: 268 - protein, 32 aa, Artificial; identical to SEQ ID NO: 255
  FR or CDR or nanobody sequence

SEQ ID NO: 269 - protein, 32 aa, Artificial; identical to SEQ ID NO: 255
  FR or CDR or nanobody sequence

SEQ ID NO: 270 - protein, 32 aa, Artificial; identical to SEQ ID NO: 255
  FR or CDR or nanobody sequence

SEQ ID NO: 271 - protein, 32 aa, Artificial; identical to SEQ ID NO: 255
  FR or CDR or nanobody sequence

SEQ ID NO: 272 - protein, 32 aa, Artificial
  FR or CDR or nanobody sequence
RFTISRDNAKNTFYLQMNSLKPEDTAVYYCAA

SEQ ID NO: 273 - protein, 32 aa, Artificial; identical to SEQ ID NO: 255
  FR or CDR or nanobody sequence

SEQ ID NO: 274 - protein, 32 aa, Artificial; identical to SEQ ID NO: 246
  FR or CDR or nanobody sequence

SEQ ID NO: 275 - protein, 32 aa, Artificial; identical to SEQ ID NO: 253
  FR or CDR or nanobody sequence

SEQ ID NO: 276 - protein, 32 aa, Artificial
  FR or CDR or nanobody sequence
RFTISRDNAKNTVYLQMNSLKPEDTAIYYCNA

SEQ ID NO: 277 - protein, 32 aa, Artificial; identical to SEQ ID NO: 256
  FR or CDR or nanobody sequence

SEQ ID NO: 278 - protein, 32 aa, Artificial; identical to SEQ ID NO: 276
  FR or CDR or nanobody sequence

SEQ ID NO: 279 - protein, 32 aa, Artificial; identical to SEQ ID NO: 276
  FR or CDR or nanobody sequence

SEQ ID NO: 280 - protein, 32 aa, Artificial; identical to SEQ ID NO: 248
  FR or CDR or nanobody sequence

SEQ ID NO: 281 - protein, 32 aa, Artificial; identical to SEQ ID NO: 12
  FR or CDR or nanobody sequence

SEQ ID NO: 282 - protein, 32 aa, Artificial
  FR or CDR or nanobody sequence
RFTISFDNAKNTVYLQMNSLKPEDTGLYICAV

SEQ ID NO: 283 - protein, 32 aa, Artificial; identical to SEQ ID NO: 12
  FR or CDR or nanobody sequence

SEQ ID NO: 284 - protein, 32 aa, Artificial
  FR or CDR or nanobody sequence
RFTISRDNGKNTVYLQMNSLKPEDTAVYYCAA

SEQ ID NO: 285 - protein, 32 aa, Artificial
  FR or CDR or nanobody sequence
RFTISRDNAKNTVYLQMNSLKPEDTAVYYCNL

SEQ ID NO: 286 - protein, 32 aa, Artificial; identical to SEQ ID NO: 255
  FR or CDR or nanobody sequence

SEQ ID NO: 287 - protein, 32 aa, Artificial; identical to SEQ ID NO: 256
  FR or CDR or nanobody sequence

SEQ ID NO: 288 - protein, 32 aa, Artificial
  FR or CDR or nanobody sequence
RLTISRDNAKNTVYLQMNSLKPEDTAVYYCSF

SEQ ID NO: 289 - protein, 32 aa, Artificial
  FR or CDR or nanobody sequence
RFTISRDNAKNTVYLQMNSLKPEDTAIYYCKA

SEQ ID NO: 290 - protein, 32 aa, Artificial
  FR or CDR or nanobody sequence
RFTISRDNRKNTVYLQMNSLKPEDTGVYYCNA

SEQ ID NO: 291 - protein, 32 aa, Artificial
  FR or CDR or nanobody sequence
RFTISRDYAKNTVYLQMNGLKPDDTAVYYCNA

SEQ ID NO: 292 - protein, 32 aa, Artificial
  FR or CDR or nanobody sequence
RFTVSRDNAKNTVYLQMNSLKPEDTAVYYCHA

SEQ ID NO: 293 - protein, 32 aa, Artificial
  FR or CDR or nanobody sequence
RFTISRDTAKNTMYLQMNSLKPEDTAIYYCNA

SEQ ID NO: 294 - protein, 32 aa, Artificial
  FR or CDR or nanobody sequence
RFTISRDNAKNTVYLQMNSLKPEDTAVYYCTA

SEQ ID NO: 295 - protein, 32 aa, Artificial
  FR or CDR or nanobody sequence
RFTISRDSAKNTVYLQMNKLKPEDTAVYYCVA

SEQ ID NO: 296 - protein, 32 aa, Artificial
  FR or CDR or nanobody sequence
RFTISSDNAKNTVYLQMNSLKPEDTAVYFCTA

SEQ ID NO: 297 - protein, 24 aa, Artificial
  FR or CDR or nanobody sequence
DGHLNWGQRYVPCSQISWRGWNDY

SEQ ID NO: 298 - protein, 24 aa, Artificial
  FR or CDR or nanobody sequence
DGHLNWGQPYVPCSQISWRGWNDY

SEQ ID NO: 299 - protein, 16 aa, Artificial
  FR or CDR or nanobody sequence
DRSVYYCSGDAPEEYY

SEQ ID NO: 300 - protein, 16 aa, Artificial
  FR or CDR or nanobody sequence
DRSVYYCSGGAPEEYY

SEQ ID NO: 301 - protein, 17 aa, Artificial
  FR or CDR or nanobody sequence
DLLRTPEFCVDSAPYDY

SEQ ID NO: 302 - protein, 16 aa, Artificial
  FR or CDR or nanobody sequence
DRSVYYCSGGAPEEYY

SEQ ID NO: 303 - protein, 16 aa, Artificial
  FR or CDR or nanobody sequence
DRSVYYCSGGAPEEYY

SEQ ID NO: 304 - protein, 18 aa, Artificial
  FR or CDR or nanobody sequence
GSTAIVGVPPTYPDEYDY

SEQ ID NO: 305 - protein, 24 aa, Artificial
  FR or CDR or nanobody sequence
DGHLNWGQRYVPCSQISWRGWNDY

SEQ ID NO: 306 - protein, 17 aa, Artificial
  FR or CDR or nanobody sequence
DWRYSDYDLPLPPPGDY

SEQ ID NO: 307 - protein, 18 aa, Artificial
  FR or CDR or nanobody sequence
EPPDSSWILDGSPEFFKF

SEQ ID NO: 308 - protein, 17 aa, Artificial
  FR or CDR or nanobody sequence
DWRYSDYDLPLPPPGDY

SEQ ID NO: 309 - protein, 18 aa, Artificial
  FR or CDR or nanobody sequence
EPPDSNWYLDGSPEFFKF

SEQ ID NO: 310 - protein, 17 aa, Artificial
  FR or CDR or nanobody sequence
DWRYSDYDLPLPPPGDY

SEQ ID NO: 311 - protein, 18 aa, Artificial
  FR or CDR or nanobody sequence
EPPDSMWSLDGSPEFFKF

SEQ ID NO: 312 - protein, 17 aa, Artificial
  FR or CDR or nanobody sequence
DWRYSDYDLPLPPPGDY

SEQ ID NO: 313 - protein, 17 aa, Artificial
  FR or CDR or nanobody sequence
DWRYSDYDLPLPPPGDY

SEQ ID NO: 314 - protein, 17 aa, Artificial
  FR or CDR or nanobody sequence
DLLRTPEFCVDSAPYDY

SEQ ID NO: 315 - protein, 17 aa, Artificial
  FR or CDR or nanobody sequence
DLLRTPEFCSDSAPYDY

SEQ ID NO: 316 - protein, 16 aa, Artificial
  FR or CDR or nanobody sequence
DRSVYYCSGGAPEEYY

SEQ ID NO: 317 - protein, 17 aa, Artificial
  FR or CDR or nanobody sequence
DLLRTPEFCTDSAPYDY

SEQ ID NO: 318 - protein, 18 aa, Artificial
  FR or CDR or nanobody sequence
GSTAIVGVPPTYPDEYDY

SEQ ID NO: 319 - protein, 17 aa, Artificial
  FR or CDR or nanobody sequence
DWRYSDYDLPLPPPGDY

SEQ ID NO: 320 - protein, 17 aa, Artificial
  FR or CDR or nanobody sequence
DWRYSDYDLPLPPPGDY

SEQ ID NO: 321 - protein, 17 aa, Artificial
  FR or CDR or nanobody sequence
DWRYSDYDLPLPPPGDY

SEQ ID NO: 322 - protein, 17 aa, Artificial
  FR or CDR or nanobody sequence
DWRYSDYDLPLPPPGDY

SEQ ID NO: 323 - protein, 18 aa, Artificial
  FR or CDR or nanobody sequence
EGLGDSDSPCGAAWYNDY

SEQ ID NO: 324 - protein, 17 aa, Artificial
  FR or CDR or nanobody sequence
DWRYSDYDLPLPPPGDY

SEQ ID NO: 325 - protein, 24 aa, Artificial
  FR or CDR or nanobody sequence
DGHLNWGQRYVPCSQISWRGWNDY

SEQ ID NO: 326 - protein, 18 aa, Artificial
  FR or CDR or nanobody sequence
GSTAIVGVPPTYPDEYDY

SEQ ID NO: 327 - protein, 10 aa, Artificial
  FR or CDR or nanobody sequence
QYGLGYAEDY

SEQ ID NO: 328 - protein, 18 aa, Artificial
  FR or CDR or nanobody sequence
ERDVPARSLCGSYYWYDY

SEQ ID NO: 329 - protein, 11 aa, Artificial
  FR or CDR or nanobody sequence
FLPGPEGFHDY

SEQ ID NO: 330 - protein, 8 aa, Artificial
  FR or CDR or nanobody sequence
YTGGGDDY

SEQ ID NO: 331 - protein, 16 aa, Artificial
  FR or CDR or nanobody sequence
DRSVYYCSGGAPEEYY

SEQ ID NO: 332 - protein, 13 aa, Artificial
  FR or CDR or nanobody sequence
DLAEFKYSDYADY

SEQ ID NO: 333 - protein, 14 aa, Artificial
  FR or CDR or nanobody sequence
TGGVRGPCAYEYEY

SEQ ID NO: 334 - protein, 17 aa, Artificial
  FR or CDR or nanobody sequence
DLLRTPEFCVDSAPYDY

SEQ ID NO: 335 - protein, 21 aa, Artificial
  FR or CDR or nanobody sequence
DKMWSPCLVAANEEALFEYDY

SEQ ID NO: 336 - protein, 9 aa, Artificial
  FR or CDR or nanobody sequence
FSLRLGRDY

SEQ ID NO: 337 - protein, 17 aa, Artificial
  FR or CDR or nanobody sequence
DWRYSDYDLPLPPPGDY

SEQ ID NO: 338 - protein, 18 aa, Artificial
  FR or CDR or nanobody sequence
EPPDSSWYLDGSPEFFKY

SEQ ID NO: 339 - protein, 13 aa, Artificial
  FR or CDR or nanobody sequence
VTTNSDYDLGRDY

SEQ ID NO: 340 - protein, 9 aa, Artificial
  FR or CDR or nanobody sequence
EVVAGDYDY

SEQ ID NO: 341 - protein, 9 aa, Artificial
  FR or CDR or nanobody sequence
RSSWYSPEY

SEQ ID NO: 342 - protein, 12 aa, Artificial
  FR or CDR or nanobody sequence
YISEVGTWRDDY

SEQ ID NO: 343 - protein, 7 aa, Artificial
  FR or CDR or nanobody sequence
FRDDYYS

SEQ ID NO: 344 - protein, 13 aa, Artificial
  FR or CDR or nanobody sequence
LGTTDSDYEGELY

SEQ ID NO: 345 - protein, 21 aa, Artificial
  FR or CDR or nanobody sequence
DGGPHAPLTVQDMCVMAIADY

SEQ ID NO: 346 - protein, 15 aa, Artificial
  FR or CDR or nanobody sequence
DEEIHLIVSISIADF

SEQ ID NO: 347 - protein, 15 aa, Artificial
  FR or CDR or nanobody sequence
LFDRCGSTWYYGMDY

SEQ ID NO: 348 - protein, 11 aa, Artificial
  FR or CDR or nanobody sequence
WGQGTQVTVSS

SEQ ID NO: 349 - protein, 11 aa, Artificial
  FR or CDR or nanobody sequence
WGQGTQVTVSS

SEQ ID NO: 350 - protein, 11 aa, Artificial
  FR or CDR or nanobody sequence
WGQGTQVTVSS

SEQ ID NO: 351 - protein, 11 aa, Artificial
  FR or CDR or nanobody sequence
WGQGTQVTVSS

SEQ ID NO: 352 - protein, 11 aa, Artificial
  FR or CDR or nanobody sequence
WGRGTQVTVSS

SEQ ID NO: 353 - protein, 11 aa, Artificial
  FR or CDR or nanobody sequence
WGQGTQVTVSS

SEQ ID NO: 354 - protein, 11 aa, Artificial
  FR or CDR or nanobody sequence
WGQGTQVTVSS

SEQ ID NO: 355 - protein, 11 aa, Artificial
  FR or CDR or nanobody sequence
WGQGTQVTVSS

SEQ ID NO: 356 - protein, 11 aa, Artificial
  FR or CDR or nanobody sequence
WGQGTQVTVSS

SEQ ID NO: 357 - protein, 11 aa, Artificial
  FR or CDR or nanobody sequence
WGQGTQVTVSS

SEQ ID NO: 358 - protein, 11 aa, Artificial
  FR or CDR or nanobody sequence
WGQGTQVTVSS

SEQ ID NO: 359 - protein, 11 aa, Artificial
  FR or CDR or nanobody sequence
WGQGTQVTVSS

SEQ ID NO: 360 - protein, 11 aa, Artificial
  FR or CDR or nanobody sequence
WGQGTQVTVSS

SEQ ID NO: 361 - protein, 11 aa, Artificial
  FR or CDR or nanobody sequence
WGQGTQVTVSS

SEQ ID NO: 362 - protein, 11 aa, Artificial
  FR or CDR or nanobody sequence
WGQGTQVTVSS

SEQ ID NO: 363 - protein, 11 aa, Artificial
  FR or CDR or nanobody sequence
WGQGTQVTVSS

SEQ ID NO: 364 - protein, 11 aa, Artificial
  FR or CDR or nanobody sequence
WGQGTQVTVSS

SEQ ID NO: 365 - protein, 11 aa, Artificial
  FR or CDR or nanobody sequence
WGQGTQVTVSS

SEQ ID NO: 366 - protein, 11 aa, Artificial
  FR or CDR or nanobody sequence
WGQGTQVTVSS

SEQ ID NO: 367 - protein, 11 aa, Artificial
  FR or CDR or nanobody sequence
WGQGTQVTVSS

SEQ ID NO: 368 - protein, 11 aa, Artificial
  FR or CDR or nanobody sequence
WGQGTQVTVSS

SEQ ID NO: 369 - protein, 11 aa, Artificial
  FR or CDR or nanobody sequence
WGQGTQVTVSS

SEQ ID NO: 370 - protein, 11 aa, Artificial
  FR or CDR or nanobody sequence
WGQGTQVTVSS

SEQ ID NO: 371 - protein, 11 aa, Artificial
  FR or CDR or nanobody sequence
WGQGTQVTVSS

SEQ ID NO: 372 - protein, 11 aa, Artificial
  FR or CDR or nanobody sequence
WGQGTQVTVSS

SEQ ID NO: 373 - protein, 11 aa, Artificial
  FR or CDR or nanobody sequence
WGQGTQVTVSS

SEQ ID NO: 374 - protein, 11 aa, Artificial
  FR or CDR or nanobody sequence
WGQGTQVTVSS

SEQ ID NO: 375 - protein, 11 aa, Artificial
  FR or CDR or nanobody sequence
WGQGTQVTVSS

SEQ ID NO: 376 - protein, 11 aa, Artificial
  FR or CDR or nanobody sequence
WGQGTQVTVSS

SEQ ID NO: 377 - protein, 11 aa, Artificial
  FR or CDR or nanobody sequence
WGQGTQVTVSS

SEQ ID NO: 378 - protein, 11 aa, Artificial
  FR or CDR or nanobody sequence
WGQGTQVTVSS

SEQ ID NO: 379 - protein, 11 aa, Artificial
  FR or CDR or nanobody sequence
RGQGTQVTVSS

SEQ ID NO: 380 - protein, 11 aa, Artificial
  FR or CDR or nanobody sequence
WGQGTQVTVSS

SEQ ID NO: 381 - protein, 11 aa, Artificial
  FR or CDR or nanobody sequence
WGQGTQVTVSS

SEQ ID NO: 382 - protein, 11 aa, Artificial
  FR or CDR or nanobody sequence
WGQGTQVTVSS

SEQ ID NO: 383 - protein, 11 aa, Artificial
  FR or CDR or nanobody sequence
WGQGTQVTVSS

SEQ ID NO: 384 - protein, 11 aa, Artificial
  FR or CDR or nanobody sequence
WGQGTQVTVSS

SEQ ID NO: 385 - protein, 11 aa, Artificial
  FR or CDR or nanobody sequence
WGQGTQVTVSS

SEQ ID NO: 386 - protein, 11 aa, Artificial
  FR or CDR or nanobody sequence
WGQGTQVTVSS

SEQ ID NO: 387 - protein, 11 aa, Artificial
  FR or CDR or nanobody sequence
WGQGTQVTVSS

SEQ ID NO: 388 - protein, 11 aa, Artificial
  FR or CDR or nanobody sequence
WGQGTQVTVSS

SEQ ID NO: 389 - protein, 11 aa, Artificial
  FR or CDR or nanobody sequence
WGQGTQVTVSS

SEQ ID NO: 390 - protein, 11 aa, Artificial
  FR or CDR or nanobody sequence
WGQGTQVTVSS

SEQ ID NO: 391 - protein, 11 aa, Artificial
  FR or CDR or nanobody sequence
WGQGTQVTVSS

SEQ ID NO: 392 - protein, 11 aa, Artificial
  FR or CDR or nanobody sequence
WGQGTQVTVSS

SEQ ID NO: 393 - protein, 11 aa, Artificial
  FR or CDR or nanobody sequence
WGQGIQVTVSS

SEQ ID NO: 394 - protein, 11 aa, Artificial
  FR or CDR or nanobody sequence
EGKGTLVTVSS

SEQ ID NO: 395 - protein, 11 aa, Artificial
  FR or CDR or nanobody sequence
WGQGTQVTVSS

SEQ ID NO: 396 - protein, 11 aa, Artificial
  FR or CDR or nanobody sequence
WGQGTQVTVSS

SEQ ID NO: 397 - protein, 11 aa, Artificial
  FR or CDR or nanobody sequence
WGQGTQVTVSS

SEQ ID NO: 398 - protein, 11 aa, Artificial
  FR or CDR or nanobody sequence
WGKGTLVTVSS

SEQ ID NO: 399 - protein, 135 aa, Artificial
  FR or CDR or nanobody sequence
EVQLVESGGGLVQPGGSLRLSCAASGFSLDYYAIGWFRQAPGKEREGVSCMDSSAGTTSTYYSDSVKGRFTISRDDAKNTVYLQMNSLKPEDTAVYYCAADGHLNWGQRYVPCSQISWRGWNDYWGQGTQVTVSS

SEQ ID NO: 400 - protein, 135 aa, Artificial
  FR or CDR or nanobody sequence
EVQLVESGGGLVQPGGSLRLSCAASGFSLDYYAIGWFRQAPGKEREGVSCMDSSDGTTNTYYSDSVKGRFTISRDDAKNTVYLQMNSLKPEDTASYYCAADGHLNWGQPYVPCSQISWRGWNDYWGQGTQVTVSS

SEQ ID NO: 401 - protein, 125 aa, Artificial
  FR or CDR or nanobody sequence
EVQLVESGGGLVQPGGSLRLSCAASGFTLDYYAIGWFRQAPGKEREGVSCISSSDGSTYYADSVKGRFTISRDNAKNTVYLQMNSLKPEDTAAYYCATDRSVYYCSGDAPEEYYWGQGTQVTVSS

SEQ ID NO: 402 - protein, 125 aa, Artificial
  FR or CDR or nanobody sequence
EVQLVESGGGLVQPGGSLRLSCAASGFTLDYFAIGWFRQAPGKERERVSCISSSDGSTYYADSVKGRFTISRDNAKNTVYLQMNSLKPEDTAVYYCATDRSVYYCSGGAPEEYYWGQGTQVTVSS

SEQ ID NO: 403 - protein, 126 aa, Artificial
  FR or CDR or nanobody sequence
EVQLVESGGGLVQPGGSLRLSCVASGFSLDYYVIGWFRQAPGKEREGVSCISSSDGSTYYADSVKGRFTISRDNAKNTVYLQMNSLKPEDTAVYYCAADLLRTPEFCVDSAPYDYWGRGTQVTVSS

SEQ ID NO: 404 - protein, 125 aa, Artificial
  FR or CDR or nanobody sequence
EVQLVESGGGLVQPGGSLRLSCAASGFTLGYFAIGWFRQAPGKEREGVSCISSSDGSTYYADSVKGRFTVSRDNAKNTVYLQMNSLKPEDTAVYYCATDRSVYYCSGGAPEEYYWGQGTQVTVSS

SEQ ID NO: 405 - protein, 125 aa, Artificial
  FR or CDR or nanobody sequence
EVQLVESGGGLVQPGGSLRLSCAASGFTLGYFAIGWFRQAPGKEREGVSCISSSDGSAYYADSVKGRFTVSRDNAKNTVYLQMNSLKPEDTAVYYCATDRSVYYCSGGAPEEYYWGQGTQVTVSS

SEQ ID NO: 406 - protein, 127 aa, Artificial
  FR or CDR or nanobody sequence
EVQLVESGGGLVQPGGSLRLSCAASGFTFDDYGMSWVRQAPGKGLEWVSAISWNGGSTYYTESMKGRFTISRDNAKNTVYLQMNSLKPEDTAVYYCVKGSTAIVGVPPTYPDEYDYWGQGTQVTVSS

SEQ ID NO: 407 - protein, 135 aa, Artificial
  FR or CDR or nanobody sequence
EVQLVESGGGLVQPGGSLRLSCAASGFSLDYYAIGWFRQAPGKEREGVSCMDSSGGTTSTYYSDSVKGRFTISRDDAKNTVYLQMNSLKPEDTAVYYCAADGHLNWGQRYVPCSQISWRGWNDYWGQGTQVTVSS

SEQ ID NO: 408 - protein, 126 aa, Artificial
  FR or CDR or nanobody sequence
EVQLVESGGGLVQPGGSLRLSCAASGFTFGSYDMSWVRQAPGKGPEWVSAINSGGGSTYYADSVKGRFTISRDNAKNTLYLQMNSLKPEDTAVYYCATDWRYSDYDLPLPPPGDYWGQGTQVTVSS

SEQ ID NO: 409 - protein, 127 aa, Artificial
  FR or CDR or nanobody sequence
EVQLVESGGGLVQAGGSLRLSCAASGFTFDDYAIGWFRQAPGKEREGISCISSSDGSTYYADSVKGRFTISSDNAKNTVYLQMNSLKPEDTAVYYCAAEPPDSSWILDGSPEFFKFWGQGTQVTVSS

SEQ ID NO: 410 - protein, 126 aa, Artificial; identical to SEQ ID NO: 408
  FR or CDR or nanobody sequence

SEQ ID NO: 411 - protein, 127 aa, Artificial
  FR or CDR or nanobody sequence
EVQLVESGGGLVQAGGSLRLSCAASGFTFDDYAIGWFRQAPGKEREGVSGISSSDGNTYYADSVKGRFTISSDNAKNTVYLQMNSLKPEDTAVYYCAAEPPDSNWYLDGSPEFFKFWGQGTQVTVSS

SEQ ID NO: 412 - protein, 126 aa, Artificial; identical to SEQ ID NO: 408
  FR or CDR or nanobody sequence

SEQ ID NO: 413 - protein, 127 aa, Artificial
  FR or CDR or nanobody sequence
EVQLVESGGGLVQAGGSLRLSCAASGFTFDDYAIGWFRQAPGKEREGVSCISSSDGSTYYADSVKGRFTISSDNAKNTVYLLMNSLKPEDTAVYYCAAEPPDSMWSLDGSPEFFKFWGQGTQVTVSS

SEQ ID NO: 414 - protein, 126 aa, Artificial; identical to SEQ ID NO: 408
  FR or CDR or nanobody sequence

SEQ ID NO: 415 - protein, 126 aa, Artificial; identical to SEQ ID NO: 408
  FR or CDR or nanobody sequence

SEQ ID NO: 416 - protein, 126 aa, Artificial
  FR or CDR or nanobody sequence
EVQLVESGGGLVQPGGSLRLSCVASGFSLDYYVIGWFRQAPGKEREGVSCISSSDGSTYYADSVKGRFTISRDNAKNTVYLQMNSLKPEDTAVYYCAADLLRTPEFCVDSAPYDYWGQGTQVTVSS

SEQ ID NO: 417 - protein, 126 aa, Artificial
  FR or CDR or nanobody sequence
EVQLVESGGGLVQPGGSLRLSCAASGFTLDYYVIGWFRQAPGKEREAVACISSSDRSTYYADSVKGRFTISRDNAKNTGYLQMNSLKPEDTAVYYCAADLLRTPEFCSDSAPYDYWGQGTQVTVSS

SEQ ID NO: 418 - protein, 125 aa, Artificial
  FR or CDR or nanobody sequence
EVQLVESGGGLVQPGGSLRLSCAASGFTLDYYAIGWWRQAPGKGREGVSCISSGDGSTNYADSVKGRFTISRDNAKNTVYLQMNSLKPEDTAVYYCATDRSVYYCSGGAPEEYYWGQGTQVTVSS

SEQ ID NO: 419 - protein, 126 aa, Artificial
  FR or CDR or nanobody sequence
EVQLVESGGGLVQPGGSLRLSCAASGFTLDYYVIGWFRQAPGKEREGVSCIGSSDDSTYYADSVKGRFTISRDNAKNTVYLQMNSLKPEDTAVYYCAADLLRTPEFCTDSAPYDYWGQGTQVTVSS

SEQ ID NO: 420 - protein, 127 aa, Artificial; identical to SEQ ID NO: 406
  FR or CDR or nanobody sequence

SEQ ID NO: 421 - protein, 126 aa, Artificial; identical to SEQ ID NO: 408
  FR or CDR or nanobody sequence

SEQ ID NO: 422 - protein, 126 aa, Artificial; identical to SEQ ID NO: 408
  FR or CDR or nanobody sequence

SEQ ID NO: 423 - protein, 126 aa, Artificial; identical to SEQ ID NO: 408
  FR or CDR or nanobody sequence

SEQ ID NO: 424 - protein, 126 aa, Artificial
  FR or CDR or nanobody sequence
EVQLVESGGGLVQPGGSLRLSCAASGFTFGSYDMSWVRQAPGKGPEWVSAINSGGDNTYYADSVKGRFTISRDNAKNTLYLQMNSLKPEDTAVYYCATDWRYSDYDLPLPPPGDYWGQGTQVTVSS

SEQ ID NO: 425 - protein, 127 aa, Artificial
  FR or CDR or nanobody sequence
EVQLVESGGGLVQPGGSLRLSCAASGFTLNYYAIGWFRQAPGKEREGVSCISSSDGSTYYADSVKGRFTISRDNAKNTFYLQMNSLKPEDTAVYYCAAEGLGDSDSPCGAAWYNDYWGQGTQVTVSS

SEQ ID NO: 426 - protein, 126 aa, Artificial; identical to SEQ ID NO: 408
  FR or CDR or nanobody sequence

SEQ ID NO: 427 - protein, 135 aa, Artificial
  FR or CDR or nanobody sequence
EVQLVESGGGLVQPGGSLRLSCAASGFSLDYYAIGWFRQAPGKEREGVSCMDSSSGTTSTYYSDSVKGRFTISRDDAKNTVYLQMNSLKPEDTAVYYCAADGHLNWGQRYVPCSQISWRGWNDYWGQGTQVTVSS

SEQ ID NO: 428 - protein, 127 aa, Artificial
  FR or CDR or nanobody sequence
EVQLVESGGGLVQPGGSLRLSCAASGFTFDDYGMSWVRQAPGRATEWVSAISWNGNNTYYTESMKGRFTISRDNAKNTVYLQMNSLKPEDTAVYYCVKGSTAIVGVPPTYPDEYDYWGQGTQVTVSS

SEQ ID NO: 429 - protein, 118 aa, Artificial
  FR or CDR or nanobody sequence
EVQLVESGGGLVQAGGSLRLSCAASGRTFSSYDMGWYRQAPGKEREFVAIITWNSSTYYADSVKGRFTISRDNAKNTVYLQMNSLKPEDTAIYYCNAQYGLGYAEDYWGQGTQVTVSS

SEQ ID NO: 430 - protein, 127 aa, Artificial
  FR or CDR or nanobody sequence
EVQLVESGGGLVQAGGSLRLSCAASGFTFDDYAIGWFRQAPGKEHEGVSCISSSDGSTYYADSVKGRFTISSDNAKNTVYLQMNSLKPEDTAVYYCAAERDVPARSLCGSYYWYDYRGQGTQVTVSS

SEQ ID NO: 431 - protein, 120 aa, Artificial
  FR or CDR or nanobody sequence
EVQLVESGGGLVQAGGSLRLSCAASGRTFSSYDMGWYRQAPGKEREFVAVIHWSSGSTYYADPVKGRFTISRDNAKNTVYLQMNSLKPEDTAIYYCNAFLPGPEGFHDYWGQGTQVTVSS

SEQ ID NO: 432 - protein, 117 aa, Artificial
  FR or CDR or nanobody sequence
EVQLVESGGGLVQAGGSLRLSCAASGRTSSSYDMTWYRQVPGKEREFVAVISWSGGSTYYADSVKGRFTISRDNAKNTVYLQMNSLKPEDTAIYYCNAYTGGGDDYWGQGTQVTVSS

SEQ ID NO: 433 - protein, 125 aa, Artificial
  FR or CDR or nanobody sequence
EVQLVESGGGLVQPGGSLRLSCAASGFTLDYYAIGWFRQAPGKERERVSCISSSDGSTYYADSVKGRFTISRDNAKNTVYLQMNSLKPEDTAAYYCATDRSVYYCSGGAPEEYYWGQGTQVTVSS

SEQ ID NO: 434 - protein, 122 aa, Artificial
  FR or CDR or nanobody sequence
EVQLVESGGGLVQAGGSLRLSCAASGRTFSSYAMGWGRQAPGKEREFVATISWSGGSTYYADSVKGRFTISRDNAKNTVYLQMNSLKPEDTAVYYCAADLAEFKYSDYADYWGQGTQVTVSS

SEQ ID NO: 435 - protein, 123 aa, Artificial
  FR or CDR or nanobody sequence
EVQLVESGGGLVQPGGSLRLSCAAAGFTLDYSAIGWFRQAPGKEREMFSCISGSDGSTWYADSVAGRFTISFDNAKNTVYLQMNSLKPEDTGLYICAVTGGVRGPCAYEYEYWGQGTQVTVSS

SEQ ID NO: 436 - protein, 126 aa, Artificial; identical to SEQ ID NO: 416
  FR or CDR or nanobody sequence

SEQ ID NO: 437 - protein, 130 aa, Artificial
  FR or CDR or nanobody sequence
EVQLVESGGGLVQPGGSLRLSCAASGFTLDYGAIGWFRQAPGKEREGVSCISSSTGSTYYADSVKGRFTISRDNGKNTVYLQMNSLKPEDTAVYYCAADKMWSPCLVAANEEALFEYDYWGQGTQVTVSS

SEQ ID NO: 438 - protein, 119 aa, Artificial
  FR or CDR or nanobody sequence
EVQLVESGGGLVQAGGSLRLSCAASGNIFDDNTMGWTWNRQPPGKQRELVAIIATDGSTNYADSVKGRFTISRDNAKNTVYLQMNSLKPEDTAVYYCNLFSLRLGRDYWGQGTQVTVSS

SEQ ID NO: 439 - protein, 126 aa, Artificial; identical to SEQ ID NO: 408
  Nanobody sequence

SEQ ID NO: 440 - protein, 127 aa, Artificial
  Nanobody sequence
EVQLVESGGGLVQAGGSLRLSCAASGFTFDDYDIGWFRQAPGKEREGVSGISSSDGNTYYADSVKGRFTISSDNAKNTVYLQMNSLKPEDTAVYYCAAEPPDSSWYLDGSPEFFKYWGQGTQVTVSS

SEQ ID NO: 441 - protein, 121 aa, Artificial
  Nanobody sequence
EVQLVESGGGLVQAGGSLRLSCAASGSIFKVNAMGWYRQAPGKQRELVAGIISGGSTNYADSVKGRLTISRDNAKNTVYLQMNSLKPEDTAVYYCSFVTTNSDYDLGRDYWGQGTQVTVSS

SEQ ID NO: 442 - protein, 118 aa, Artificial
  Nanobody sequence
EVQLVESGGGLVQAGGSLRLSCAASGRTFSSYDMGWYRQAPGKEREFVAVISRSGSSTYYADSVKGRFTISRDNAKNTVYLQMNSLKPEDTAIYYCKAEVVAGDYDYWGQGTQVTVSS

SEQ ID NO: 443 - protein, 117 aa, Artificial
  Nanobody sequence
EVQLVESGGGLVQAGGSLRLSCTASGNIFSTETMGWYRQPPGKQRDVVATITHGGTTNYADSVKGRFTISRDNRKNTVYLQMNSLKPEDTGVYYCNARSSWYSPEYWGQGTQVTVSS

SEQ ID NO: 444 - protein, 120 aa, Artificial
  Nanobody sequence
EVQLVESGGGFVQAGGSLRLSCIASGDNFSINRMGWYRQALGKQRELVAIITNHGSTNYADAVKGRFTISRDYAKNTVYLQMNGLKPDDTAVYYCNAYISEVGTWRDDYWGQGIQVTVSS

SEQ ID NO: 445 - protein, 116 aa, Artificial
  Nanobody sequence
EVQLVESGGGLVQAGGSLRLSCAASGRTFSGADAGWNRQTPGKEREFVAAINWSGNSTYYADSVKGRFTVSRDNAKNTVYLQMNSLKPEDTAVYYCHAFRDDYYSEGKGTLVTVSS

SEQ ID NO: 446 - protein, 122 aa, Artificial
  Nanobody sequence
EVQLVESGGGLVQAGGSLRLSCAASGRTLSSYDMGWYRQGPGKEREFVAAISWSGGGTDYVDSVKGRFTISRDTAKNTMYLQMNSLKPEDTAIYYCNALGTTDSDYEGELYWGQGTQVTVSS

SEQ ID NO: 447 - protein, 130 aa, Artificial
  Nanobody sequence
EVQLVESGGGLVQPGGSLRLSCAASGFTLDSYAIGWFRQAPGKEPEGVSCISTSDGSTYYADSVKGRFTISRDNAKNTVYLQMNSLKPEDTAVYYCTADGGPHAPLTVQDMCVMAIADYWGQGTQVTVSS

SEQ ID NO: 448 - protein, 124 aa, Artificial
  Nanobody sequence
EVQLVESGGGLVQAGGSLRLSCAASGRTFSNIAMGWIREAPGKEREFVAALTWSGGSTYYADSVKGRFTISRDSAKNTVYLQMNKLKPEDTAVYYCVADEEIHLIVSISIADFWGQGTQVTVSS

SEQ ID NO: 449 - protein, 124 aa, Artificial
  Nanobody sequence
EVQLVESGGGLVQAGGSLRLSCAASGLTDDDFAIGWFRQAPGKEPEGVSCISSSDGSTYYADSVKGRFTISSDNAKNTVYLQMNSLKPEDTAVYFCTALFDRCGSTWYYGMDYWGKGTLVTVSS

SEQ ID NO: 450 - protein, 244 aa, Artificial
  Nanobody sequence
EVQLVESGGGLVQAGGSLRLSCAASGRTFSSYDMGWYRQAPGKEREFVAVIHWSSGSTYYADPVKGRFTISRDNAKNTVYLQMNSLKPEDTAIYYCNAFLPGPEGFHDYWGQGTQVTVSSGGGGSGGGSEVQLVESGGGLVQPGNSLRLSCAASGFTFRSFGMSWVRQAPGKEPEWVSSISGSGSDTLYADSVKGRFTISRDNAKTTLYLQMNSLKPEDTAVYYCTIGGSLSRSSQGTQVTVSS

SEQ ID NO: 451 - protein, 241 aa, Artificial
  Nanobody sequence
EVQLVESGGGLVQAGGSLRLSCAASGRTSSSYDMTWYRQVPGKEREFVAVISWSGGSTYYADSVKGRFTISRDNAKNTVYLQMNSLKPEDTAIYYCNAYTGGGDDYWGQGTQVTVSSGGGGSGGGSEVQLVESGGGLVQPGNSLRLSCAASGFTFRSFGMSWVRQAPGKEPEWVSSISGSGSDTLYADSVKGRFTISRDNAKTTLYLQMNSLKPEDTAVYYCTIGGSLSRSSQGTQVTVSS

SEQ ID NO: 452 - protein, 249 aa, Artificial
  Nanobody sequence
EVQLVESGGGLVQPGGSLRLSCAASGFTLDYYAIGWFRQAPGKERERVSCISSSDGSTYYADSVKGRFTISRDNAKNTVYLQMNSLKPEDTAAYYCATDRSVYYCSGGAPEEYYWGQGTQVTVSSGGGGSGGGSEVQLVESGGGLVQPGNSLRLSCAASGFTFRSFGMSWVRQAPGKEPEWVSSISGSGSDTLYADSVKGRFTISRDNAKTTLYLQMNSLKPEDTAVYYCTIGGSLSRSSQGTQVTVSS

SEQ ID NO: 453 - protein, 250 aa, Artificial
  Nanobody sequence
EVQLVESGGGLVQPGGSLRLSCVASGFSLDYYVIGWFRQAPGKEREGVSCISSSDGSTYYADSVKGRFTISRDNAKNTVYLQMNSLKPEDTAVYYCAADLLRTPEFCVDSAPYDYWGQGTQVTVSSGGGGSGGGSEVQLVESGGGLVQPGNSLRLSCAASGFTFRSFGMSWVRQAPGKEPEWVSSISGSGSDTLYADSVKGRFTISRDNAKTTLYLQMNSLKPEDTAVYYCTIGGSLSRSSQGTQVTVSS

SEQ ID NO: 454 - protein, 245 aa, Artificial
  Nanobody sequence
EVQLVESGGGLVQAGGSLRLSCAASGSIFKVNAMGWYRQAPGKQRELVAGIISGGSTNYADSVKGRLTISRDNAKNTVYLQMNSLKPEDTAVYYCSFVTTNSDYDLGRDYWGQGTQVTVSSGGGGSGGGSEVQLVESGGGLVQPGNSLRLSCAASGFTFRSFGMSWVRQAPGKEPEWVSSISGSGSDTLYADSVKGRFTISRDNAKTTLYLQMNSLKPEDTAVYYCTIGGSLSRSSQGTQVTVSS

SEQ ID NO: 455 - protein, 259 aa, Artificial
  Nanobody sequence
EVQLVESGGGLVQPGGSLRLSCAASGFSLDYYAIGWFRQAPGKEREGVSCMDSSSGTTSTYYSDSVKGRFTISRDDAKNTVYLQMNSLKPEDTAVYYCAADGHLNWGQRYVPCSQISWRGWNDYWGQGTQVTVSSGGGGSGGGSEVQLVESGGGLVQPGNSLRLSCAASGFTFRSFGMSWVRQAPGKEPEWVSSISGSGSDTLYADSVKGRFTISRDNAKTTLYLQMNSLKPEDTAVYYCTIGGSLSRSSQGTQVTVSS

SEQ ID NO: 456 - protein, 242 aa, Artificial
  Nanobody sequence
EVQLVESGGGLVQAGGSLRLSCAASGRTFSSYDMGWYRQAPGKEREFVAIITWNSSTYYADSVKGRFTISRDNAKNTVYLQMNSLKPEDTAIYYCNAQYGLGYAEDYWGQGTQVTVSSGGGGSGGGSEVQLVESGGGLVQPGNSLRLSCAASGFTFRSFGMSWVRQAPGKEPEWVSSISGSGSDTLYADSVKGRFTISRDNAKTTLYLQMNSLKPEDTAVYYCTIGGSLSRSSQGTQVTVSS

SEQ ID NO: 457 - protein, 251 aa, Artificial
  Nanobody sequence
EVQLVESGGGLVQAGGSLRLSCAASGFTFDDYAIGWFRQAPGKEHEGVSCISSSDGSTYYADSVKGRFTISSDNAKNTVYLQMNSLKPEDTAVYYCAAERDVPARSLCGSYYWYDYRGQGTQVTVSSGGGGSGGGSEVQLVESGGGLVQPGNSLRLSCAASGFTFRSFGMSWVRQAPGKEPEWVSSISGSGSDTLYADSVKGRFTISRDNAKTTLYLQMNSLKPEDTAVYYCTIGGSLSRSSQGTQVTVSS

SEQ ID NO: 458 - protein, 246 aa, Artificial
  Nanobody sequence
EVQLVESGGGLVQAGGSLRLSCAASGRTFSSYAMGWGRQAPGKEREFVATISWSGGSTYYADSVKGRFTISRDNAKNTVYLQMNSLKPEDTAVYYCAADLAEFKYSDYADYWGQGTQVTVSSGGGGSGGGSEVQLVESGGGLVQPGNSLRLSCAASGFTFRSFGMSWVRQAPGKEPEWVSSISGSGSDTLYADSVKGRFTISRDNAKTTLYLQMNSLKPEDTAVYYCTIGGSLSRSSQGTQVTVSS

SEQ ID NO: 459 - protein, 247 aa, Artificial
  Nanobody sequence
EVQLVESGGGLVQPGGSLRLSCAAAGFTLDYSAIGWFRQAPGKEREMFSCISGSDGSTWYADSVAGRFTISFDNAKNTVYLQMNSLKPEDTGLYICAVTGGVRGPCAYEYEYWGQGTQVTVSSGGGGSGGGSEVQLVESGGGLVQPGNSLRLSCAASGFTFRSFGMSWVRQAPGKEPEWVSSISGSGSDTLYADSVKGRFTISRDNAKTTLYLQMNSLKPEDTAVYYCTIGGSLSRSSQGTQVTVSS

SEQ ID NO: 460 - protein, 254 aa, Artificial
  Nanobody sequence
EVQLVESGGGLVQPGGSLRLSCAASGFTLDYGAIGWFRQAPGKEREGVSCISSSTGSTYYADSVKGRFTISRDNGKNTVYLQMNSLKPEDTAVYYCAADKMWSPCLVAANEEALFEYDYWGQGTQVTVSSGGGGSGGGSEVQLVESGGGLVQPGNSLRLSCAASGFTFRSFGMSWVRQAPGKEPEWVSSISGSGSDTLYADSVKGRFTISRDNAKTTLYLQMNSLKPEDTAVYYCTIGGSLSRSSQGTQVTVSS

SEQ ID NO: 461 - protein, 243 aa, Artificial
  Nanobody sequence
EVQLVESGGGLVQAGGSLRLSCAASGNIFDDNTMGWTWNRQPPGKQRELVAIIATDGSTNYADSVKGRFTISRDNAKNTVYLQMNSLKPEDTAVYYCNLFSLRLGRDYWGQGTQVTVSSGGGGSGGGSEVQLVESGGGLVQPGNSLRLSCAASGFTFRSFGMSWVRQAPGKEPEWVSSISGSGSDTLYADSVKGRFTISRDNAKTTLYLQMNSLKPEDTAVYYCTIGGSLSRSSQGTQVTVSS

SEQ ID NO: 462 - protein, 250 aa, Artificial
  Nanobody sequence
EVQLVESGGGLVQPGGSLRLSCAASGFTFGSYDMSWVRQAPGKGPEWVSAINSGGGSTYYADSVKGRFTISRDNAKNTLYLQMNSLKPEDTAVYYCATDWRYSDYDLPLPPPGDYWGQGTQVTVSSGGGGSGGGSEVQLVESGGGLVQPGNSLRLSCAASGFTFRSFGMSWVRQAPGKEPEWVSSISGSGSDTLYADSVKGRFTISRDNAKTTLYLQMNSLKPEDTAVYYCTIGGSLSRSSQGTQVTVSS

SEQ ID NO: 463 - protein, 251 aa, Artificial
  Nanobody sequence
EVQLVESGGGLVQAGGSLRLSCAASGFTFDDYDIGWFRQAPGKEREGVSGISSSDGNTYYADSVKGRFTISSDNAKNTVYLQMNSLKPEDTAVYYCAAEPPDSSWYLDGSPEFFKYWGQGTQVTVSSGGGGSGGGSEVQLVESGGGLVQPGNSLRLSCAASGFTFRSFGMSWVRQAPGKEPEWVSSISGSGSDTLYADSVKGRFTISRDNAKTTLYLQMNSLKPEDTAVYYCTIGGSLSRSSQGTQVTVSS

SEQ ID NO: 464 - protein, 242 aa, Artificial
  Nanobody sequence
EVQLVESGGGLVQAGGSLRLSCAASGRTFSSYDMGWYRQAPGKEREFVAVISRSGSSTYYADSVKGRFTISRDNAKNTVYLQMNSLKPEDTAIYYCKAEVVAGDYDYWGQGTQVTVSSGGGGSGGGSEVQLVESGGGLVQPGNSLRLSCAASGFTFRSFGMSWVRQAPGKEPEWVSSISGSGSDTLYADSVKGRFTISRDNAKTTLYLQMNSLKPEDTAVYYCTIGGSLSRSSQGTQVTVSS

SEQ ID NO: 465 - protein, 241 aa, Artificial
  Nanobody sequence
EVQLVESGGGLVQAGGSLRLSCTASGNIFSTETMGWYRQPPGKQRDVVATITHGGTTNYADSVKGRFTISRDNRKNTVYLQMNSLKPEDTGVYYCNARSSWYSPEYWGQGTQVTVSSGGGGSGGGSEVQLVESGGGLVQPGNSLRLSCAASGFTFRSFGMSWVRQAPGKEPEWVSSISGSGSDTLYADSVKGRFTISRDNAKTTLYLQMNSLKPEDTAVYYCTIGGSLSRSSQGTQVTVSS

SEQ ID NO: 466 - protein, 244 aa, Artificial
  Nanobody sequence
EVQLVESGGGFVQAGGSLRLSCIASGDNFSINRMGWYRQALGKQRELVAIITNHGSTNYADAVKGRFTISRDYAKNTVYLQMNGLKPDDTAVYYCNAYISEVGTWRDDYWGQGIQVTVSSGGGGSGGGSEVQLVESGGGLVQPGNSLRLSCAASGFTFRSFGMSWVRQAPGKEPEWVSSISGSGSDTLYADSVKGRFTISRDNAKTTLYLQMNSLKPEDTAVYYCTIGGSLSRSSQGTQVTVSS

SEQ ID NO: 467 - protein, 240 aa, Artificial
  Nanobody sequence
EVQLVESGGGLVQAGGSLRLSCAASGRTFSGADAGWNRQTPGKEREFVAAINWSGNSTYYADSVKGRFTVSRDNAKNTVYLQMNSLKPEDTAVYYCHAFRDDYYSEGKGTLVTVSSGGGGSGGGSEVQLVESGGGLVQPGNSLRLSCAASGFTFRSFGMSWVRQAPGKEPEWVSSISGSGSDTLYADSVKGRFTISRDNAKTTLYLQMNSLKPEDTAVYYCTIGGSLSRSSQGTQVTVSS

SEQ ID NO: 468 - protein, 246 aa, Artificial
  Nanobody sequence
EVQLVESGGGLVQAGGSLRLSCAASGRTLSSYDMGWYRQGPGKEREFVAAISWSGGGTDYVDSVKGRFTISRDTAKNTMYLQMNSLKPEDTAIYYCNALGTTDSDYEGELYWGQGTQVTVSSGGGGSGGGSEVQLVESGGGLVQPGNSLRLSCAASGFTFSSFGMSWVRQAPGKGLEWVSSISGSGSDTLYADSVKGRFTISRDNAKTTLYLQMNSLRPEDTAVYYCTIGGSLSRSSQGTLVTVSS

SEQ ID NO: 469 - protein, 254 aa, Artificial
  Nanobody sequence
EVQLVESGGGLVQPGGSLRLSCAASGFTLDSYAIGWFRQAPGKEPEGVSCISTSDGSTYYADSVKGRFTISRDNAKNTVYLQMNSLKPEDTAVYYCTADGGPHAPLTVQDMCVMAIADYWGQGTQVTVSSGGGGSGGGSEVQLVESGGGLVQPGNSLRLSCAASGFTFSSFGMSWVRQAPGKGLEWVSSISGSGSDTLYADSVKGRFTISRDNAKTTLYLQMNSLRPEDTAVYYCTIGGSLSRSSQGTLVTVSS

SEQ ID NO: 470 - protein, 248 aa, Artificial
  Nanobody sequence
EVQLVESGGGLVQAGGSLRLSCAASGRTFSNIAMGWIREAPGKEREFVAALTWSGGSTYYADSVKGRFTISRDSAKNTVYLQMNKLKPEDTAVYYCVADEEIHLIVSISIADFWGQGTQVTVSSGGGGSGGGSEVQLVESGGGLVQPGNSLRLSCAASGFTFSSFGMSWVRQAPGKGLEWVSSISGSGSDTLYADSVKGRFTISRDNAKTTLYLQMNSLRPEDTAVYYCTIGGSLSRSSQGTLVTVSS

SEQ ID NO: 471 - protein, 248 aa, Artificial
  Nanobody sequence
EVQLVESGGGLVQAGGSLRLSCAASGLTDDDFAIGWFRQAPGKEPEGVSCISSSDGSTYYADSVKGRFTISSDNAKNTVYLQMNSLKPEDTAVYFCTALFDRCGSTWYYGMDYWGKGTLVTVSSGGGGSGGGSEVQLVESGGGLVQPGNSLRLSCAASGFTFSSFGMSWVRQAPGKGLEWVSSISGSGSDTLYADSVKGRFTISRDNAKTTLYLQMNSLRPEDTAVYYCTIGGSLSRSSQGTLVTVSS

SEQ ID NO: 472 - protein, 22 aa, Artificial
  leader sequence
VKKLLFAIPLVVPFYAAQPAMA

SEQ ID NO: 473 - protein, 22 aa, Artificial
  leader sequence
VKKLLFAIPLVVPFYAAQPAIA

SEQ ID NO: 474 - protein, 9 aa, Artificial
  leader sequence
FELASVAQA

SEQ ID NO: 475 - protein, 21 aa, Artificial
  leader sequence
MKKTAIAIAVALAGLATVAQA

SEQ ID NO: 476 - protein, 21 aa, Artificial
  leader sequence
MKKTAIAFAVALAGLATVAQA

SEQ ID NO: 477 - protein, 23 aa, Artificial
  leader sequence
AAAEQKLISEEDLNGAAHHHHHH

SEQ ID NO: 478 - protein, 375 aa, Artificial
  Nanobody sequence
EVQLVESGGGLVQAGGSLRLSCAASGSIFKVNAMGWYRQAPGKQRELVAGIISGGSTNYADSVKGRLTISRDNAKNTVYLQMNSLKPEDTAVYYCSFVTTNSDYDLGRDYWGQGTQVTVSSGGGGSGGGSAVQLVESGGGLVQPGNSLRLSCAASGFTFRSFGMSWVRQAPGKEPEWVSSISGSGSDTLYADSVKGRFTISRDNAKTTLYLQMNSLKPEDTAVYYCTIGGSLSRSSQGTQVTVSSGGGGSGGGSEVQLVESGGGLVQAGGSLRLSCAASGSIFKVNAMGWYRQAPGKQRELVAGIISGGSTNYADSVKGRLTISRDNAKNTVYLQMNSLKPEDTAVYYCSFVTTNSDYDLGRDYWGQGTQVTVSS

SEQ ID NO: 479 - protein, 387 aa, Artificial
  Nanobody sequence
EVQLVESGGGLVQAGGSLRLSCAASGFTFDDYDIGWFRQAPGKEREGVSGISSSDGNTYYADSVKGRFTISSDNAKNTVYLQMNSLKPEDTAVYYCAAEPPDSSWYLDGSPEFFKYWGQGTQVTVSSGGGGSGGGSAVQLVESGGGLVQPGNSLRLSCAASGFTFRSFGMSWVRQAPGKEPEWVSSISGSGSDTLYADSVKGRFTISRDNAKTTLYLQMNSLKPEDTAVYYCTIGGSLSRSSQGTQVTVSSGGGGSGGGSEVQLVESGGGLVQAGGSLRLSCAASGFTFDDYDIGWFRQAPGKEREGVSGISSSDGNTYYADSVKGRFTISSDNAKNTVYLQMNSLKPEDTAVYYCAAEPPDSSWYLDGSPEFFKYWGQGTQVTVSS

SEQ ID NO: 480 - protein, 367 aa, Artificial
  Nanobody sequence
EVQLVESGGGLVQAGGSLRLSCAASGRTSSSYDMTWYRQVPGKEREFVAVISWSGGSTYYADSVKGRFTISRDNAKNTVYLQMNSLKPEDTAIYYCNAYTGGGDDYWGQGTQVTVSSGGGGSGGGSAVQLVESGGGLVQPGNSLRLSCAASGFTFRSFGMSWVRQAPGKEPEWVSSISGSGSDTLYADSVKGRFTISRDNAKTTLYLQMNSLKPEDTAVYYCTIGGSLSRSSQGTQVTVSSGGGGSGGGSEVQLVESGGGLVQAGGSLRLSCAASGRTSSSYDMTWYRQVPGKEREFVAVISWSGGSTYYADSVKGRFTISRDNAKNTVYLQMNSLKPEDTAIYYCNAYTGGGDDYWGQGTQVTVSS

SEQ ID NO: 481 - protein, 387 aa, Artificial
  Nanobody sequence
EVQLVESGGGLVQPGGSLRLSCAASGFTFDDYGMSWVRQAPGRATEWVSAISWNGNNTYYTESMKGRFTISRDNAKNTVYLQMNSLKPEDTAVYYCVKGSTAIVGVPPTYPDEYDYWGQGTQVTVSSGGGGSGGGSAVQLVESGGGLVQPGNSLRLSCAASGFTFRSFGMSWVRQAPGKEPEWVSSISGSGSDTLYADSVKGRFTISRDNAKTTLYLQMNSLKPEDTAVYYCTIGGSLSRSSQGTQVTVSSGGGGSGGGSEVQLVESGGGLVQPGGSLRLSCAASGFTFDDYGMSWVRQAPGRATEWVSAISWNGNNTYYTESMKGRFTISRDNAKNTVYLQMNSLKPEDTAVYYCVKGSTAIVGVPPTYPDEYDYWGQGTQVTVSS

SEQ ID NO: 482 - protein, 403 aa, Artificial
  Nanobody sequence
EVQLVESGGGLVQPGGSLRLSCAASGFSLDYYAIGWFRQAPGKEREGVSCMDSSSGTTSTYYSDSVKGRFTISRDDAKNTVYLQMNSLKPEDTAVYYCAADGHLNWGQRYVPCSQISWRGWNDYWGQGTQVTVSSGGGGSGGGSAVQLVESGGGLVQPGNSLRLSCAASGFTFRSFGMSWVRQAPGKEPEWVSSISGSGSDTLYADSVKGRFTISRDNAKTTLYLQMNSLKPEDTAVYYCTIGGSLSRSSQGTQVTVSSGGGGSGGGSEVQLVESGGGLVQPGGSLRLSCAASGFSLDYYAIGWFRQAPGKEREGVSCMDSSSGTTSTYYSDSVKGRFTISRDDAKNTVYLQMNSLKPEDTAVYYCAADGHLNWGQRYVPCSQISWRGWNDYWGQGTQVTVSS

SEQ ID NO: 483 - protein, 375 aa, Artificial
  Nanobody sequence
AVQLVESGGGLVQPGNSLRLSCAASGFTFRSFGMSWVRQAPGKEPEWVSSISGSGSDTLYADSVKGRFTISRDNAKTTLYLQMNSLKPEDTAVYYCTIGGSLSRSSQGTQVTVSSGGGGSGGGSEVQLVESGGGLVQAGGSLRLSCAASGSIFKVNAMGWYRQAPGKQRELVAGIISGGSTNYADSVKGRLTISRDNAKNTVYLQMNSLKPEDTAVYYCSFVTTNSDYDLGRDYWGQGTQVTVSSGGGGSGGGSEVQLVESGGGLVQAGGSLRLSCAASGSIFKVNAMGWYRQAPGKQRELVAGIISGGSTNYADSVKGRLTISRDNAKNTVYLQMNSLKPEDTAVYYCSFVTTNSDYDLGRDYWGQGTQVTVSS

SEQ ID NO: 484 - protein, 387 aa, Artificial
  Nanobody sequence
AVQLVESGGGLVQPGNSLRLSCAASGFTFRSFGMSWVRQAPGKEPEWVSSISGSGSDTLYADSVKGRFTISRDNAKTTLYLQMNSLKPEDTAVYYCTIGGSLSRSSQGTQVTVSSGGGGSGGGSEVQLVESGGGLVQAGGSLRLSCAASGFTFDDYDIGWFRQAPGKEREGVSGISSSDGNTYYADSVKGRFTISSDNAKNTVYLQMNSLKPEDTAVYYCAAEPPDSSWYLDGSPEFFKYWGQGTQVTVSSGGGGSGGGSEVQLVESGGGLVQAGGSLRLSCAASGFTFDDYDIGWFRQAPGKEREGVSGISSSDGNTYYADSVKGRFTISSDNAKNTVYLQMNSLKPEDTAVYYCAAEPPDSSWYLDGSPEFFKYWGQGTQVTVSS

SEQ ID NO: 485 - protein, 367 aa, Artificial
  Nanobody sequence
AVQLVESGGGLVQPGNSLRLSCAASGFTFRSFGMSWVRQAPGKEPEWVSSISGSGSDTLYADSVKGRFTISRDNAKTTLYLQMNSLKPEDTAVYYCTIGGSLSRSSQGTQVTVSSGGGGSGGGSEVQLVESGGGLVQAGGSLRLSCAASGRTSSSYDMTWYRQVPGKEREFVAVISWSGGSTYYADSVKGRFTISRDNAKNTVYLQMNSLKPEDTAIYYCNAYTGGGDDYWGQGTQVTVSSGGGGSGGGSEVQLVESGGGLVQAGGSLRLSCAASGRTSSSYDMTWYRQVPGKEREFVAVISWSGGSTYYADSVKGRFTISRDNAKNTVYLQMNSLKPEDTAIYYCNAYTGGGDDYWGQGTQVTVSS

SEQ ID NO: 486 - protein, 387 aa, Artificial
  Nanobody sequence
AVQLVESGGGLVQPGNSLRLSCAASGFTFRSFGMSWVRQAPGKEPEWVSSISGSGSDTLYADSVKGRFTISRDNAKTTLYLQMNSLKPEDTAVYYCTIGGSLSRSSQGTQVTVSSGGGGSGGGSEVQLVESGGGLVQPGGSLRLSCAASGFTFDDYGMSWVRQAPGRATEWVSAISWNGNNTYYTESMKGRFTISRDNAKNTVYLQMNSLKPEDTAVYYCVKGSTAIVGVPPTYPDEYDYWGQGTQVTVSSGGGGSGGGSEVQLVESGGGLVQPGGSLRLSCAASGFTFDDYGMSWVRQAPGRATEWVSAISWNGNNTYYTESMKGRFTISRDNAKNTVYLQMNSLKPEDTAVYYCVKGSTAIVGVPPTYPDEYDYWGQGTQVTVSS

SEQ ID NO: 487 - protein, 403 aa, Artificial
  Nanobody sequence
AVQLVESGGGLVQPGNSLRLSCAASGFTFRSFGMSWVRQAPGKEPEWVSSISGSGSDTLYADSVKGRFTISRDNAKTTLYLQMNSLKPEDTAVYYCTIGGSLSRSSQGTQVTVSSGGGGSGGGSEVQLVESGGGLVQPGGSLRLSCAASGFSLDYYAIGWFRQAPGKEREGVSCMDSSSGTTSTYYSDSVKGRFTISRDDAKNTVYLQMNSLKPEDTAVYYCAADGHLNWGQRYVPCSQISWRGWNDYWGQGTQVTVSSGGGGSGGGSEVQLVESGGGLVQPGGSLRLSCAASGFSLDYYAIGWFRQAPGKEREGVSCMDSSSGTTSTYYSDSVKGRFTISRDDAKNTVYLQMNSLKPEDTAVYYCAADGHLNWGQRYVPCSQISWRGWNDYWGQGTQVTVSS

SEQ ID NO: 488 - protein, 375 aa, Artificial
  Nanobody sequence
EVQLVESGGGLVQAGGSLRLSCAASGSIFKVNAMGWYRQAPGKQRELVAGIISGGSTNYADSVKGRLTISRDNAKNTVYLQMNSLKPEDTAVYYCSFVTTNSDYDLGRDYWGQGTQVTVSSGGGGSGGGSEVQLVESGGGLVQAGGSLRLSCAASGSIFKVNAMGWYRQAPGKQRELVAGIISGGSTNYADSVKGRLTISRDNAKNTVYLQMNSLKPEDTAVYYCSFVTTNSDYDLGRDYWGQGTQVTVSSGGGGSGGGSAVQLVESGGGLVQPGNSLRLSCAASGFTFRSFGMSWVRQAPGKEPEWVSSISGSGSDTLYADSVKGRFTISRDNAKTTLYLQMNSLKPEDTAVYYCTIGGSLSRSSQGTQVTVSS

SEQ ID NO: 489 - protein, 387 aa, Artificial
  Nanobody sequence
EVQLVESGGGLVQAGGSLRLSCAASGFTFDDYDIGWFRQAPGKEREGVSGISSSDGNTYYADSVKGRFTISSDNAKNTVYLQMNSLKPEDTAVYYCAAEPPDSSWYLDGSPEFFKYWGQGTQVTVSSGGGGSGGGSEVQLVESGGGLVQAGGSLRLSCAASGFTFDDYDIGWFRQAPGKEREGVSGISSSDGNTYYADSVKGRFTISSDNAKNTVYLQMNSLKPEDTAVYYCAAEPPDSSWYLDGSPEFFKYWGQGTQVTVSSGGGGSGGGSAVQLVESGGGLVQPGNSLRLSCAASGFTFRSFGMSWVRQAPGKEPEWVSSISGSGSDTLYADSVKGRFTISRDNAKTTLYLQMNSLKPEDTAVYYCTIGGSLSRSSQGTQVTVSS

SEQ ID NO: 490 - protein, 367 aa, Artificial
  Nanobody sequence
EVQLVESGGGLVQAGGSLRLSCAASGRTSSSYDMTWYRQVPGKEREFVAVISWSGGSTYYADSVKGRFTISRDNAKNTVYLQMNSLKPEDTAIYYCNAYTGGGDDYWGQGTQVTVSSGGGGSGGGSEVQLVESGGGLVQAGGSLRLSCAASGRTSSSYDMTWYRQVPGKEREFVAVISWSGGSTYYADSVKGRFTISRDNAKNTVYLQMNSLKPEDTAIYYCNAYTGGGDDYWGQGTQVTVSSGGGGSGGGSAVQLVESGGGLVQPGNSLRLSCAASGFTFRSFGMSWVRQAPGKEPEWVSSISGSGSDTLYADSVKGRFTISRDNAKTTLYLQMNSLKPEDTAVYYCTIGGSLSRSSQGTQVTVSS

SEQ ID NO: 491 - protein, 387 aa, Artificial
  Nanobody sequence
EVQLVESGGGLVQPGGSLRLSCAASGFTFDDYGMSWVRQAPGRATEWVSAISWNGNNTYYTESMKGRFTISRDNAKNTVYLQMNSLKPEDTAVYYCVKGSTAIVGVPPTYPDEYDYWGQGTQVTVSSGGGGSGGGSEVQLVESGGGLVQPGGSLRLSCAASGFTFDDYGMSWVRQAPGRATEWVSAISWNGNNTYYTESMKGRFTISRDNAKNTVYLQMNSLKPEDTAVYYCVKGSTAIVGVPPTYPDEYDYWGQGTQVTVSSGGGGSGGGSAVQLVESGGGLVQPGNSLRLSCAASGFTFRSFGMSWVRQAPGKEPEWVSSISGSGSDTLYADSVKGRFTISRDNAKTTLYLQMNSLKPEDTAVYYCTIGGSLSRSSQGTQVTVSS

SEQ ID NO: 492 - protein, 403 aa, Artificial
  Nanobody sequence
EVQLVESGGGLVQPGGSLRLSCAASGFSLDYYAIGWFRQAPGKEREGVSCMDSSSGTTSTYYSDSVKGRFTISRDDAKNTVYLQMNSLKPEDTAVYYCAADGHLNWGQRYVPCSQISWRGWNDYWGQGTQVTVSSGGGGSGGGSEVQLVESGGGLVQPGGSLRLSCAASGFSLDYYAIGWFRQAPGKEREGVSCMDSSSGTTSTYYSDSVKGRFTISRDDAKNTVYLQMNSLKPEDTAVYYCAADGHLNWGQRYVPCSQISWRGWNDYWGQGTQVTVSSGGGGSGGGSAVQLVESGGGLVQPGNSLRLSCAASGFTFRSFGMSWVRQAPGKEPEWVSSISGSGSDTLYADSVKGRFTISRDNAKTTLYLQMNSLKPEDTAVYYCTIGGSLSRSSQGTQVTVSS

SEQ ID NO: 493 - protein, 375 aa, Artificial
  Nanobody sequence
EVQLVESGGGLVQPGGSLRLSCAASGSIFKVNAMGWYRQAPGKGRELVAGIISGGSTNYADSVKGRLTISRDNAKNTVYLQMNSLRPEDTAVYYCSFVTTNSDYDLGRDYWGQGTLVTVSSGGGGSGGGSEVQLVESGGGLVQPGNSLRLSCAASGFTFSSFGMSWVRQAPGKGLEWVSSISGSGSDTLYADSVKGRFTISRDNAKTTLYLQMNSLRPEDTAVYYCTIGGSLSRSSQGTLVTVSSGGGGSGGGSEVQLVESGGGLVQPGGSLRLSCAASGSIFKVNAMGWYRQAPGKGRELVAGIISGGSTNYADSVKGRLTISRDNAKNTVYLQMNSLRPEDTAVYYCSFVTTNSDYDLGRDYWGQGTLVTVSS

SEQ ID NO: 494 - protein, 375 aa, Artificial
  Nanobody sequence
EVQLVESGGGLVQPGGSLRLSCAASGSIFKVNAMGWYRQAPGKGRELVAGIISGGSTNYADSVKGRFTISRDNAKNTVYLQMNSLRPEDTAVYYCSFVTTNSDYDLGRDYWGQGTLVTVSSGGGGSGGGSEVQLVESGGGLVQPGNSLRLSCAASGFTFSSFGMSWVRQAPGKGLEWVSSISGSGSDTLYADSVKGRFTISRDNAKTTLYLQMNSLRPEDTAVYYCTIGGSLSRSSQGTLVTVSSGGGGSGGGSEVQLVESGGGLVQPGGSLRLSCAASGSIFKVNAMGWYRQAPGKGRELVAGIISGGSTNYADSVKGRFTISRDNAKNTVYLQMNSLRPEDTAVYYCSFVTTNSDYDLGRDYWGQGTLVTVSS

SEQ ID NO: 495 - protein, 375 aa, Artificial
  Nanobody sequence
EVQLVESGGGLVQPGGSLRLSCAASGSIFKVNAMGWYRQAPGKGRELVAGIISGGSTNYADSVKGRLTISRDNAKNTLYLQMNSLRPEDTAVYYCSFVTTNSDYDLGRDYWGQGTLVTVSSGGGGSGGGSEVQLVESGGGLVQPGNSLRLSCAASGFTFSSFGMSWVRQAPGKGLEWVSSISGSGSDTLYADSVKGRFTISRDNAKTTLYLQMNSLRPEDTAVYYCTIGGSLSRSSQGTLVTVSSGGGGSGGGSEVQLVESGGGLVQPGGSLRLSCAASGSIFKVNAMGWYRQAPGKGRELVAGIISGGSTNYADSVKGRLTISRDNAKNTLYLQMNSLRPEDTAVYYCSFVTTNSDYDLGRDYWGQGTLVTVSS

SEQ ID NO: 496 - protein, 375 aa, Artificial
  Nanobody sequence
EVQLVESGGGLVQPGGSLRLSCAASGSIFKVNAMGWYRQAPGKGRELVAGIISGGSTNYADSVKGRLTISRDNAKNTVYLQMNSLRPEDTAVYYCAFVTTNSDYDLGRDYWGQGTLVTVSSGGGGSGGGSEVQLVESGGGLVQPGNSLRLSCAASGFTFSSFGMSWVRQAPGKGLEWVSSISGSGSDTLYADSVKGRFTISRDNAKTTLYLQMNSLRPEDTAVYYCTIGGSLSRSSQGTLVTVSSGGGGSGGGSEVQLVESGGGLVQPGGSLRLSCAASGSIFKVNAMGWYRQAPGKGRELVAGIISGGSTNYADSVKGRLTISRDNAKNTVYLQMNSLRPEDTAVYYCAFVTTNSDYDLGRDYWGQGTLVTVSS

SEQ ID NO: 497 - protein, 375 aa, Artificial
  Nanobody sequence
EVQLVESGGGLVQPGGSLRLSCAASGSIFKVNAMGWYRQAPGKGRELVAGIISGGSTNYADSVKGRFTISRDNAKNTLYLQMNSLRPEDTAVYYCAFVTTNSDYDLGRDYWGQGTLVTVSSGGGGSGGGSEVQLVESGGGLVQPGNSLRLSCAASGFTFSSFGMSWVRQAPGKGLEWVSSISGSGSDTLYADSVKGRFTISRDNAKTTLYLQMNSLRPEDTAVYYCTIGGSLSRSSQGTLVTVSSGGGGSGGGSEVQLVESGGGLVQPGGSLRLSCAASGSIFKVNAMGWYRQAPGKGRELVAGIISGGSTNYADSVKGRFTISRDNAKNTLYLQMNSLRPEDTAVYYCAFVTTNSDYDLGRDYWGQGTLVTVSS

SEQ ID NO: 498 - protein, 387 aa, Artificial
  Nanobody sequence
EVQLVESGGGLVQPGGSLRLSCAASGFTFDDYDIGWFRQAPGKGREGVSGISSSDGNTYYADSVKGRFTISSDNAKNTVYLQMNSLRPEDTAVYYCAAEPPDSSWYLDGSPEFFKYWGQGTLVTVSSGGGGSGGGSEVQLVESGGGLVQPGNSLRLSCAASGFTFSSFGMSWVRQAPGKGLEWVSSISGSGSDTLYADSVKGRFTISRDNAKTTLYLQMNSLRPEDTAVYYCTIGGSLSRSSQGTLVTVSSGGGGSGGGSEVQLVESGGGLVQPGGSLRLSCAASGFTFDDYDIGWFRQAPGKGREGVSGISSSDGNTYYADSVKGRFTISSDNAKNTVYLQMNSLRPEDTAVYYCAAEPPDSSWYLDGSPEFFKYWGQGTLVTVSS

SEQ ID NO: 499 - protein, 387 aa, Artificial
  Nanobody sequence
EVQLVESGGGLVQPGGSLRLSCAASGFTFSDYDIGWFRQAPGKGREGVSGISSSDGNTYYADSVKGRFTISSDNAKNTVYLQMNSLRPEDTAVYYCAAEPPDSSWYLDGSPEFFKYWGQGTLVTVSSGGGGSGGGSEVQLVESGGGLVQPGNSLRLSCAASGFTFSSFGMSWVRQAPGKGLEWVSSISGSGSDTLYADSVKGRFTISRDNAKTTLYLQMNSLRPEDTAVYYCTIGGSLSRSSQGTLVTVSSGGGGSGGGSEVQLVESGGGLVQPGGSLRLSCAASGFTFSDYDIGWFRQAPGKGREGVSGISSSDGNTYYADSVKGRFTISSDNAKNTVYLQMNSLRPEDTAVYYCAAEPPDSSWYLDGSPEFFKYWGQGTLVTVSS

SEQ ID NO: 500 - protein, 387 aa, Artificial
  Nanobody sequence
EVQLVESGGGLVQPGGSLRLSCAASGFTFDDYDIGWFRQAPGKGREGVSGISSSDGNTYYADSVKGRFTISRDNAKNTVYLQMNSLRPEDTAVYYCAAEPPDSSWYLDGSPEFFKYWGQGTLVTVSSGGGGSGGGSEVQLVESGGGLVQPGNSLRLSCAASGFTFSSFGMSWVRQAPGKGLEWVSSISGSGSDTLYADSVKGRFTISRDNAKTTLYLQMNSLRPEDTAVYYCTIGGSLSRSSQGTLVTVSSGGGGSGGGSEVQLVESGGGLVQPGGSLRLSCAASGFTFDDYDIGWFRQAPGKGREGVSGISSSDGNTYYADSVKGRFTISRDNAKNTVYLQMNSLRPEDTAVYYCAAEPPDSSWYLDGSPEFFKYWGQGTLVTVSS

SEQ ID NO: 501 - protein, 387 aa, Artificial
  Nanobody sequence
EVQLVESGGGLVQPGGSLRLSCAASGFTFDDYDIGWFRQAPGKGREGVSGISSSDGNTYYADSVKGRFTISSDNAKNTLYLQMNSLRPEDTAVYYCAAEPPDSSWYLDGSPEFFKYWGQGTLVTVSSGGGGSGGGSEVQLVESGGGLVQPGNSLRLSCAASGFTFSSFGMSWVRQAPGKGLEWVSSISGSGSDTLYADSVKGRFTISRDNAKTTLYLQMNSLRPEDTAVYYCTIGGSLSRSSQGTLVTVSSGGGGSGGGSEVQLVESGGGLVQPGGSLRLSCAASGFTFDDYDIGWFRQAPGKGREGVSGISSSDGNTYYADSVKGRFTISSDNAKNTLYLQMNSLRPEDTAVYYCAAEPPDSSWYLDGSPEFFKYWGQGTLVTVSS

SEQ ID NO: 502 - protein, 387 aa, Artificial
  Nanobody sequence
EVQLVESGGGLVQPGGSLRLSCAASGFTFSDYDIGWFRQAPGKGREGVSGISSSDGNTYYADSVKGRFTISRDNAKNTLYLQMNSLRPEDTAVYYCAAEPPDSSWYLDGSPEFFKYWGQGTLVTVSSGGGGSGGGSEVQLVESGGGLVQPGNSLRLSCAASGFTFSSFGMSWVRQAPGKGLEWVSSISGSGSDTLYADSVKGRFTISRDNAKTTLYLQMNSLRPEDTAVYYCTIGGSLSRSSQGTLVTVSSGGGGSGGGSEVQLVESGGGLVQPGGSLRLSCAASGFTFSDYDIGWFRQAPGKGREGVSGISSSDGNTYYADSVKGRFTISRDNAKNTLYLQMNSLRPEDTAVYYCAAEPPDSSWYLDGSPEFFKYWGQGTLVTVSS

SEQ ID NO: 503 - protein, 387 aa, Artificial
  Nanobody sequence
EVQLVESGGGLVQPGGSLRLSCAASGFTFDDYGMSWVRQAPGRATEWVSAISWNGNNTYYTESMKGRFTISRDNAKNTVYLQMNSLRPEDTAVYYCVKGSTAIVGVPPTYPDEYDYWGQGTLVTVSSGGGGSGGGSEVQLVESGGGLVQPGNSLRLSCAASGFTFSSFGMSWVRQAPGKGLEWVSSISGSGSDTLYADSVKGRFTISRDNAKTTLYLQMNSLRPEDTAVYYCTIGGSLSRSSQGTLVTVSSGGGGSGGGSEVQLVESGGGLVQPGGSLRLSCAASGFTFDDYGMSWVRQAPGRATEWVSAISWNGNNTYYTESMKGRFTISRDNAKNTVYLQMNSLRPEDTAVYYCVKGSTAIVGVPPTYPDEYDYWGQGTLVTVSS

SEQ ID NO: 504 - protein, 387 aa, Artificial
  Nanobody sequence
EVQLVESGGGLVQPGGSLRLSCAASGFTFDDYGMSWVRQAPGKGLEWVSAISWNGNNTYYTESMKGRFTISRDNAKNTVYLQMNSLRPEDTAVYYCVKGSTAIVGVPPTYPDEYDYWGQGTLVTVSSGGGGSGGGSEVQLVESGGGLVQPGNSLRLSCAASGFTFSSFGMSWVRQAPGKGLEWVSSISGSGSDTLYADSVKGRFTISRDNAKTTLYLQMNSLRPEDTAVYYCTIGGSLSRSSQGTLVTVSSGGGGSGGGSEVQLVESGGGLVQPGGSLRLSCAASGFTFDDYGMSWVRQAPGKGLEWVSAISWNGNNTYYTESMKGRFTISRDNAKNTVYLQMNSLRPEDTAVYYCVKGSTAIVGVPPTYPDEYDYWGQGTLVTVSS

SEQ ID NO: 505 - protein, 387 aa, Artificial
  Nanobody sequence
EVQLVESGGGLVQPGGSLRLSCAASGFTFDDYGMSWVRQAPGRATEWVSAISWNGNNTYYTESMKGRFTISRDNAKNTLYLQMNSLRPEDTAVYYCVKGSTAIVGVPPTYPDEYDYWGQGTLVTVSSGGGGSGGGSEVQLVESGGGLVQPGNSLRLSCAASGFTFSSFGMSWVRQAPGKGLEWVSSISGSGSDTLYADSVKGRFTISRDNAKTTLYLQMNSLRPEDTAVYYCTIGGSLSRSSQGTLVTVSSGGGGSGGGSEVQLVESGGGLVQPGGSLRLSCAASGFTFDDYGMSWVRQAPGRATEWVSAISWNGNNTYYTESMKGRFTISRDNAKNTLYLQMNSLRPEDTAVYYCVKGSTAIVGVPPTYPDEYDYWGQGTLVTVSS

SEQ ID NO: 506 - protein, 387 aa, Artificial
  Nanobody sequence
EVQLVESGGGLVQPGGSLRLSCAASGFTFDDYGMSWVRQAPGKGLEWVSAISWNGNNTYYTESMKGRFTISRDNAKNTLYLQMNSLRPEDTAVYYCVKGSTAIVGVPPTYPDEYDYWGQGTLVTVSSGGGGSGGGSEVQLVESGGGLVQPGNSLRLSCAASGFTFSSFGMSWVRQAPGKGLEWVSSISGSGSDTLYADSVKGRFTISRDNAKTTLYLQMNSLRPEDTAVYYCTIGGSLSRSSQGTLVTVSSGGGGSGGGSEVQLVESGGGLVQPGGSLRLSCAASGFTFDDYGMSWVRQAPGKGLEWVSAISWNGNNTYYTESMKGRFTISRDNAKNTLYLQMNSLRPEDTAVYYCVKGSTAIVGVPPTYPDEYDYWGQGTLVTVSS

SEQ ID NO: 507 - protein, 387 aa, Artificial
  Nanobody sequence
EVQLVESGGGLVQPGGSLRLSCAASGFTFDDYGMSWVRQAPGRGLEWVSAISWNGNNTYYTESMKGRFTISRDNAKNTLYLQMNSLRPEDTAVYYCVKGSTAIVGVPPTYPDEYDYWGQGTLVTVSSGGGGSGGGSEVQLVESGGGLVQPGNSLRLSCAASGFTFSSFGMSWVRQAPGKGLEWVSSISGSGSDTLYADSVKGRFTISRDNAKTTLYLQMNSLRPEDTAVYYCTIGGSLSRSSQGTLVTVSSGGGGSGGGSEVQLVESGGGLVQPGGSLRLSCAASGFTFDDYGMSWVRQAPGRGLEWVSAISWNGNNTYYTESMKGRFTISRDNAKNTLYLQMNSLRPEDTAVYYCVKGSTAIVGVPPTYPDEYDYWGQGTLVTVSS

SEQ ID NO: 508 - protein, 387 aa, Artificial
  Nanobody sequence
EVQLVESGGGLVQPGGSLRLSCAASGFTFDDYGMSWVRQAPGRALEWVSAISWNGNNTYYTESMKGRFTISRDNAKNTLYLQMNSLRPEDTAVYYCVKGSTAIVGVPPTYPDEYDYWGQGTLVTVSSGGGGSGGGSEVQLVESGGGLVQPGNSLRLSCAASGFTFSSFGMSWVRQAPGKGLEWVSSISGSGSDTLYADSVKGRFTISRDNAKTTLYLQMNSLRPEDTAVYYCTIGGSLSRSSQGTLVTVSSGGGGSGGGSEVQLVESGGGLVQPGGSLRLSCAASGFTFDDYGMSWVRQAPGRALEWVSAISWNGNNTYYTESMKGRFTISRDNAKNTLYLQMNSLRPEDTAVYYCVKGSTAIVGVPPTYPDEYDYWGQGTLVTVSS

SEQ ID NO: 509 - protein, 387 aa, Artificial
  Nanobody sequence
EVQLVESGGGLVQPGGSLRLSCAASGFTFDDYGMSWVRQAPGKATEWVSAISWNGNNTYYTESMKGRFTISRDNAKNTLYLQMNSLRPEDTAVYYCVKGSTAIVGVPPTYPDEYDYWGQGTLVTVSSGGGGSGGGSEVQLVESGGGLVQPGNSLRLSCAASGFTFSSFGMSWVRQAPGKGLEWVSSISGSGSDTLYADSVKGRFTISRDNAKTTLYLQMNSLRPEDTAVYYCTIGGSLSRSSQGTLVTVSSGGGGSGGGSEVQLVESGGGLVQPGGSLRLSCAASGFTFDDYGMSWVRQAPGKATEWVSAISWNGNNTYYTESMKGRFTISRDNAKNTLYLQMNSLRPEDTAVYYCVKGSTAIVGVPPTYPDEYDYWGQGTLVTVSS

SEQ ID NO: 510 - protein, 387 aa, Artificial
  Nanobody sequence
EVQLVESGGGLVQPGGSLRLSCAASGFTFDDYGMSWVRQAPGKGTEWVSAISWNGNNTYYTESMKGRFTISRDNAKNTLYLQMNSLRPEDTAVYYCVKGSTAIVGVPPTYPDEYDYWGQGTLVTVSSGGGGSGGGSEVQLVESGGGLVQPGNSLRLSCAASGFTFSSFGMSWVRQAPGKGLEWVSSISGSGSDTLYADSVKGRFTISRDNAKTTLYLQMNSLRPEDTAVYYCTIGGSLSRSSQGTLVTVSSGGGGSGGGSEVQLVESGGGLVQPGGSLRLSCAASGFTFDDYGMSWVRQAPGKGTEWVSAISWNGNNTYYTESMKGRFTISRDNAKNTLYLQMNSLRPEDTAVYYCVKGSTAIVGVPPTYPDEYDYWGQGTLVTVSS

SEQ ID NO: 511 - protein, 387 aa, Artificial
  Nanobody sequence
EVQLVESGGGLVQPGGSLRLSCAASGFTFDDYGMSWVRQAPGRGTEWVSAISWNGNNTYYTESMKGRFTISRDNAKNTLYLQMNSLRPEDTAVYYCVKGSTAIVGVPPTYPDEYDYWGQGTLVTVSSGGGGSGGGSEVQLVESGGGLVQPGNSLRLSCAASGFTFSSFGMSWVRQAPGKGLEWVSSISGSGSDTLYADSVKGRFTISRDNAKTTLYLQMNSLRPEDTAVYYCTIGGSLSRSSQGTLVTVSSGGGGSGGGSEVQLVESGGGLVQPGGSLRLSCAASGFTFDDYGMSWVRQAPGRGTEWVSAISWNGNNTYYTESMKGRFTISRDNAKNTLYLQMNSLRPEDTAVYYCVKGSTAIVGVPPTYPDEYDYWGQGTLVTVSS

SEQ ID NO: 512 - protein, 387 aa, Artificial
  Nanobody sequence
EVQLVESGGGLVQPGGSLRLSCAASGFTFDDYGMSWVRQAPGKALEWVSAISWNGNNTYYTESMKGRFTISRDNAKNTLYLQMNSLRPEDTAVYYCVKGSTAIVGVPPTYPDEYDYWGQGTLVTVSSGGGGSGGGSEVQLVESGGGLVQPGNSLRLSCAASGFTFSSFGMSWVRQAPGKGLEWVSSISGSGSDTLYADSVKGRFTISRDNAKTTLYLQMNSLRPEDTAVYYCTIGGSLSRSSQGTLVTVSSGGGGSGGGSEVQLVESGGGLVQPGGSLRLSCAASGFTFDDYGMSWVRQAPGKALEWVSAISWNGNNTYYTESMKGRFTISRDNAKNTLYLQMNSLRPEDTAVYYCVKGSTAIVGVPPTYPDEYDYWGQGTLVTVSS

SEQ ID NO: 513 - protein, 387 aa, Artificial
  Nanobody sequence
EVQLVESGGGLVQPGGSLRLSCAASGFTFSDYGMSWVRQAPGKGTEWVSAISWNGNNTYYTESMKGRFTISRDNAKNTLYLQMNSLRPEDTAVYYCVKGSTAIVGVPPTYPDEYDYWGQGTLVTVSSGGGGSGGGSEVQLVESGGGLVQPGNSLRLSCAASGFTFSSFGMSWVRQAPGKGLEWVSSISGSGSDTLYADSVKGRFTISRDNAKTTLYLQMNSLRPEDTAVYYCTIGGSLSRSSQGTLVTVSSGGGGSGGGSEVQLVESGGGLVQPGGSLRLSCAASGFTFSDYGMSWVRQAPGKGTEWVSAISWNGNNTYYTESMKGRFTISRDNAKNTLYLQMNSLRPEDTAVYYCVKGSTAIVGVPPTYPDEYDYWGQGTLVTVSS

SEQ ID NO: 514 - protein, 387 aa, Artificial
  Nanobody sequence
EVQLVESGGGLVQPGGSLRLSCAASGFTFSDYGMSWVRQAPGKGTEWVSAISWNGNNTYYTESMKGRFTISRDNAKNTLYLQMNSLRPEDTAVYYCAKGSTAIVGVPPTYPDEYDYWGQGTLVTVSSGGGGSGGGSEVQLVESGGGLVQPGNSLRLSCAASGFTFSSFGMSWVRQAPGKGLEWVSSISGSGSDTLYADSVKGRFTISRDNAKTTLYLQMNSLRPEDTAVYYCTIGGSLSRSSQGTLVTVSSGGGGSGGGSEVQLVESGGGLVQPGGSLRLSCAASGFTFSDYGMSWVRQAPGKGTEWVSAISWNGNNTYYTESMKGRFTISRDNAKNTLYLQMNSLRPEDTAVYYCAKGSTAIVGVPPTYPDEYDYWGQGTLVTVSS

SEQ ID NO: 515 - protein, 375 aa, Artificial
  Nanobody sequence
EVQLVESGGGLVQPGGSLRLSCAASGSIFKVNAMGWYRQAPGKGRELVAGIISGGSTNYADSVKGRLTISRDNAKNTVYLQMNSLRPEDTAVYYCSFVTTNSDYDLGRDYWGQGTLVTVSSGGGGSGGGSEVQLVESGGGLVQPGGSLRLSCAASGSIFKVNAMGWYRQAPGKGRELVAGIISGGSTNYADSVKGRLTISRDNAKNTVYLQMNSLRPEDTAVYYCSFVTTNSDYDLGRDYWGQGTLVTVSSGGGGSGGGSEVQLVESGGGLVQPGNSLRLSCAASGFTFSSFGMSWVRQAPGKGLEWVSSISGSGSDTLYADSVKGRFTISRDNAKTTLYLQMNSLRPEDTAVYYCTIGGSLSRSSQGTLVTVSS

SEQ ID NO: 516 - protein, 375 aa, Artificial
  Nanobody sequence
EVQLVESGGGLVQPGGSLRLSCAASGSIFKVNAMGWYRQAPGKGRELVAGIISGGSTNYADSVKGRFTISRDNAKNTVYLQMNSLRPEDTAVYYCSFVTTNSDYDLGRDYWGQGTLVTVSSGGGGSGGGSEVQLVESGGGLVQPGGSLRLSCAASGSIFKVNAMGWYRQAPGKGRELVAGIISGGSTNYADSVKGRFTISRDNAKNTVYLQMNSLRPEDTAVYYCSFVTTNSDYDLGRDYWGQGTLVTVSSGGGGSGGGSEVQLVESGGGLVQPGNSLRLSCAASGFTFSSFGMSWVRQAPGKGLEWVSSISGSGSDTLYADSVKGRFTISRDNAKTTLYLQMNSLRPEDTAVYYCTIGGSLSRSSQGTLVTVSS

SEQ ID NO: 517 - protein, 375 aa, Artificial
  Nanobody sequence
EVQLVESGGGLVQPGGSLRLSCAASGSIFKVNAMGWYRQAPGKGRELVAGIISGGSTNYADSVKGRLTISRDNAKNTLYLQMNSLRPEDTAVYYCSFVTTNSDYDLGRDYWGQGTLVTVSSGGGGSGGGSEVQLVESGGGLVQPGGSLRLSCAASGSIFKVNAMGWYRQAPGKGRELVAGIISGGSTNYADSVKGRLTISRDNAKNTLYLQMNSLRPEDTAVYYCSFVTTNSDYDLGRDYWGQGTLVTVSSGGGGSGGGSEVQLVESGGGLVQPGNSLRLSCAASGFTFSSFGMSWVRQAPGKGLEWVSSISGSGSDTLYADSVKGRFTISRDNAKTTLYLQMNSLRPEDTAVYYCTIGGSLSRSSQGTLVTVSS

SEQ ID NO: 518 - protein, 375 aa, Artificial
  Nanobody sequence
EVQLVESGGGLVQPGGSLRLSCAASGSIFKVNAMGWYRQAPGKGRELVAGIISGGSTNYADSVKGRLTISRDNAKNTVYLQMNSLRPEDTAVYYCAFVTTNSDYDLGRDYWGQGTLVTVSSGGGGSGGGSEVQLVESGGGLVQPGGSLRLSCAASGSIFKVNAMGWYRQAPGKGRELVAGIISGGSTNYADSVKGRLTISRDNAKNTVYLQMNSLRPEDTAVYYCAFVTTNSDYDLGRDYWGQGTLVTVSSGGGGSGGGSEVQLVESGGGLVQPGNSLRLSCAASGFTFSSFGMSWVRQAPGKGLEWVSSISGSGSDTLYADSVKGRFTISRDNAKTTLYLQMNSLRPEDTAVYYCTIGGSLSRSSQGTLVTVSS

SEQ ID NO: 519 - protein, 375 aa, Artificial
  Nanobody sequence
EVQLVESGGGLVQPGGSLRLSCAASGSIFKVNAMGWYRQAPGKGRELVAGIISGGSTNYADSVKGRFTISRDNAKNTLYLQMNSLRPEDTAVYYCAFVTTNSDYDLGRDYWGQGTLVTVSSGGGGSGGGSEVQLVESGGGLVQPGGSLRLSCAASGSIFKVNAMGWYRQAPGKGRELVAGIISGGSTNYADSVKGRFTISRDNAKNTLYLQMNSLRPEDTAVYYCAFVTTNSDYDLGRDYWGQGTLVTVSSGGGGSGGGSEVQLVESGGGLVQPGNSLRLSCAASGFTFSSFGMSWVRQAPGKGLEWVSSISGSGSDTLYADSVKGRFTISRDNAKTTLYLQMNSLRPEDTAVYYCTIGGSLSRSSQGTLVTVSS

SEQ ID NO: 520 - protein, 387 aa, Artificial
  Nanobody sequence
EVQLVESGGGLVQPGGSLRLSCAASGFTFDDYDIGWFRQAPGKGREGVSGISSSDGNTYYADSVKGRFTISSDNAKNTVYLQMNSLRPEDTAVYYCAAEPPDSSWYLDGSPEFFKYWGQGTLVTVSSGGGGSGGGSEVQLVESGGGLVQPGGSLRLSCAASGFTFDDYDIGWFRQAPGKGREGVSGISSSDGNTYYADSVKGRFTISSDNAKNTVYLQMNSLRPEDTAVYYCAAEPPDSSWYLDGSPEFFKYWGQGTLVTVSSGGGGSGGGSEVQLVESGGGLVQPGNSLRLSCAASGFTFSSFGMSWVRQAPGKGLEWVSSISGSGSDTLYADSVKGRFTISRDNAKTTLYLQMNSLRPEDTAVYYCTIGGSLSRSSQGTLVTVSS

SEQ ID NO: 521 - protein, 387 aa, Artificial
  Nanobody sequence
EVQLVESGGGLVQPGGSLRLSCAASGFTFSDYDIGWFRQAPGKGREGVSGISSSDGNTYYADSVKGRFTISSDNAKNTVYLQMNSLRPEDTAVYYCAAEPPDSSWYLDGSPEFFKYWGQGTLVTVSSGGGGSGGGSEVQLVESGGGLVQPGGSLRLSCAASGFTFSDYDIGWFRQAPGKGREGVSGISSSDGNTYYADSVKGRFTISSDNAKNTVYLQMNSLRPEDTAVYYCAAEPPDSSWYLDGSPEFFKYWGQGTLVTVSSGGGGSGGGSEVQLVESGGGLVQPGNSLRLSCAASGFTFSSFGMSWVRQAPGKGLEWVSSISGSGSDTLYADSVKGRFTISRDNAKTTLYLQMNSLRPEDTAVYYCTIGGSLSRSSQGTLVTVSS

SEQ ID NO: 522 - protein, 387 aa, Artificial
  Nanobody sequence
EVQLVESGGGLVQPGGSLRLSCAASGFTFDDYDIGWFRQAPGKGREGVSGISSSDGNTYYADSVKGRFTISRDNAKNTVYLQMNSLRPEDTAVYYCAAEPPDSSWYLDGSPEFFKYWGQGTLVTVSSGGGGSGGGSEVQLVESGGGLVQPGGSLRLSCAASGFTFDDYDIGWFRQAPGKGREGVSGISSSDGNTYYADSVKGRFTISRDNAKNTVYLQMNSLRPEDTAVYYCAAEPPDSSWYLDGSPEFFKYWGQGTLVTVSSGGGGSGGGSEVQLVESGGGLVQPGNSLRLSCAASGFTFSSFGMSWVRQAPGKGLEWVSSISGSGSDTLYADSVKGRFTISRDNAKTTLYLQMNSLRPEDTAVYYCTIGGSLSRSSQGTLVTVSS

SEQ ID NO: 523 - protein, 387 aa, Artificial
  Nanobody sequence
EVQLVESGGGLVQPGGSLRLSCAASGFTFDDYDIGWFRQAPGKGREGVSGISSSDGNTYYADSVKGRFTISSDNAKNTLYLQMNSLRPEDTAVYYCAAEPPDSSWYLDGSPEFFKYWGQGTLVTVSSGGGGSGGGSEVQLVESGGGLVQPGGSLRLSCAASGFTFDDYDIGWFRQAPGKGREGVSGISSSDGNTYYADSVKGRFTISSDNAKNTLYLQMNSLRPEDTAVYYCAAEPPDSSWYLDGSPEFFKYWGQGTLVTVSSGGGGSGGGSEVQLVESGGGLVQPGNSLRLSCAASGFTFSSFGMSWVRQAPGKGLEWVSSISGSGSDTLYADSVKGRFTISRDNAKTTLYLQMNSLRPEDTAVYYCTIGGSLSRSSQGTLVTVSS

SEQ ID NO: 524 - protein, 387 aa, Artificial
  Nanobody sequence
EVQLVESGGGLVQPGGSLRLSCAASGFTFSDYDIGWFRQAPGKGREGVSGISSSDGNTYYADSVKGRFTISRDNAKNTLYLQMNSLRPEDTAVYYCAAEPPDSSWYLDGSPEFFKYWGQGTLVTVSSGGGGSGGGSEVQLVESGGGLVQPGGSLRLSCAASGFTFSDYDIGWFRQAPGKGREGVSGISSSDGNTYYADSVKGRFTISRDNAKNTLYLQMNSLRPEDTAVYYCAAEPPDSSWYLDGSPEFFKYWGQGTLVTVSSGGGGSGGGSEVQLVESGGGLVQPGNSLRLSCAASGFTFSSFGMSWVRQAPGKGLEWVSSISGSGSDTLYADSVKGRFTISRDNAKTTLYLQMNSLRPEDTAVYYCTIGGSLSRSSQGTLVTVSS

SEQ ID NO: 525 - protein, 387 aa, Artificial
  Nanobody sequence
EVQLVESGGGLVQPGGSLRLSCAASGFTFDDYGMSWVRQAPGRATEWVSAISWNGNNTYYTESMKGRFTISRDNAKNTVYLQMNSLRPEDTAVYYCVKGSTAIVGVPPTYPDEYDYWGQGTLVTVSSGGGGSGGGSEVQLVESGGGLVQPGGSLRLSCAASGFTFDDYGMSWVRQAPGRATEWVSAISWNGNNTYYTESMKGRFTISRDNAKNTVYLQMNSLRPEDTAVYYCVKGSTAIVGVPPTYPDEYDYWGQGTLVTVSSGGGGSGGGSEVQLVESGGGLVQPGNSLRLSCAASGFTFSSFGMSWVRQAPGKGLEWVSSISGSGSDTLYADSVKGRFTISRDNAKTTLYLQMNSLRPEDTAVYYCTIGGSLSRSSQGTLVTVSS

SEQ ID NO: 526 - protein, 387 aa, Artificial
  Nanobody sequence
EVQLVESGGGLVQPGGSLRLSCAASGFTFDDYGMSWVRQAPGKGLEWVSAISWNGNNTYYTESMKGRFTISRDNAKNTVYLQMNSLRPEDTAVYYCVKGSTAIVGVPPTYPDEYDYWGQGTLVTVSSGGGGSGGGSEVQLVESGGGLVQPGGSLRLSCAASGFTFDDYGMSWVRQAPGKGLEWVSAISWNGNNTYYTESMKGRFTISRDNAKNTVYLQMNSLRPEDTAVYYCVKGSTAIVGVPPTYPDEYDYWGQGTLVTVSSGGGGSGGGSEVQLVESGGGLVQPGNSLRLSCAASGFTFSSFGMSWVRQAPGKGLEWVSSISGSGSDTLYADSVKGRFTISRDNAKTTLYLQMNSLRPEDTAVYYCTIGGSLSRSSQGTLVTVSS

SEQ ID NO: 527 - protein, 387 aa, Artificial
  Nanobody sequence
EVQLVESGGGLVQPGGSLRLSCAASGFTFDDYGMSWVRQAPGRATEWVSAISWNGNNTYYTESMKGRFTISRDNAKNTLYLQMNSLRPEDTAVYYCVKGSTAIVGVPPTYPDEYDYWGQGTLVTVSSGGGGSGGGSEVQLVESGGGLVQPGGSLRLSCAASGFTFDDYGMSWVRQAPGRATEWVSAISWNGNNTYYTESMKGRFTISRDNAKNTLYLQMNSLRPEDTAVYYCVKGSTAIVGVPPTYPDEYDYWGQGTLVTVSSGGGGSGGGSEVQLVESGGGLVQPGNSLRLSCAASGFTFSSFGMSWVRQAPGKGLEWVSSISGSGSDTLYADSVKGRFTISRDNAKTTLYLQMNSLRPEDTAVYYCTIGGSLSRSSQGTLVTVSS

SEQ ID NO: 528 - protein, 387 aa, Artificial
  Nanobody sequence
EVQLVESGGGLVQPGGSLRLSCAASGFTFDDYGMSWVRQAPGKGLEWVSAISWNGNNTYYTESMKGRFTISRDNAKNTLYLQMNSLRPEDTAVYYCVKGSTAIVGVPPTYPDEYDYWGQGTLVTVSSGGGGSGGGSEVQLVESGGGLVQPGGSLRLSCAASGFTFDDYGMSWVRQAPGKGLEWVSAISWNGNNTYYTESMKGRFTISRDNAKNTLYLQMNSLRPEDTAVYYCVKGSTAIVGVPPTYPDEYDYWGQGTLVTVSSGGGGSGGGSEVQLVESGGGLVQPGNSLRLSCAASGFTFSSFGMSWVRQAPGKGLEWVSSISGSGSDTLYADSVKGRFTISRDNAKTTLYLQMNSLRPEDTAVYYCTIGGSLSRSSQGTLVTVSS

SEQ ID NO: 529 - protein, 387 aa, Artificial
  Nanobody sequence
EVQLVESGGGLVQPGGSLRLSCAASGFTFDDYGMSWVRQAPGRGLEWVSAISWNGNNTYYTESMKGRFTISRDNAKNTLYLQMNSLRPEDTAVYYCVKGSTAIVGVPPTYPDEYDYWGQGTLVTVSSGGGGSGGGSEVQLVESGGGLVQPGGSLRLSCAASGFTFDDYGMSWVRQAPGRGLEWVSAISWNGNNTYYTESMKGRFTISRDNAKNTLYLQMNSLRPEDTAVYYCVKGSTAIVGVPPTYPDEYDYWGQGTLVTVSSGGGGSGGGSEVQLVESGGGLVQPGNSLRLSCAASGFTFSSFGMSWVRQAPGKGLEWVSSISGSGSDTLYADSVKGRFTISRDNAKTTLYLQMNSLRPEDTAVYYCTIGGSLSRSSQGTLVTVSS

SEQ ID NO: 530 - protein, 387 aa, Artificial
  Nanobody sequence
EVQLVESGGGLVQPGGSLRLSCAASGFTFDDYGMSWVRQAPGRALEWVSAISWNGNNTYYTESMKGRFTISRDNAKNTLYLQMNSLRPEDTAVYYCVKGSTAIVGVPPTYPDEYDYWGQGTLVTVSSGGGGSGGGSEVQLVESGGGLVQPGGSLRLSCAASGFTFDDYGMSWVRQAPGRALEWVSAISWNGNNTYYTESMKGRFTISRDNAKNTLYLQMNSLRPEDTAVYYCVKGSTAIVGVPPTYPDEYDYWGQGTLVTVSSGGGGSGGGSEVQLVESGGGLVQPGNSLRLSCAASGFTFSSFGMSWVRQAPGKGLEWVSSISGSGSDTLYADSVKGRFTISRDNAKTTLYLQMNSLRPEDTAVYYCTIGGSLSRSSQGTLVTVSS

SEQ ID NO: 531 - protein, 387 aa, Artificial
  Nanobody sequence
EVQLVESGGGLVQPGGSLRLSCAASGFTFDDYGMSWVRQAPGKATEWVSAISWNGNNTYYTESMKGRFTISRDNAKNTLYLQMNSLRPEDTAVYYCVKGSTAIVGVPPTYPDEYDYWGQGTLVTVSSGGGGSGGGSEVQLVESGGGLVQPGGSLRLSCAASGFTFDDYGMSWVRQAPGKATEWVSAISWNGNNTYYTESMKGRFTISRDNAKNTLYLQMNSLRPEDTAVYYCVKGSTAIVGVPPTYPDEYDYWGQGTLVTVSSGGGGSGGGSEVQLVESGGGLVQPGNSLRLSCAASGFTFSSFGMSWVRQAPGKGLEWVSSISGSGSDTLYADSVKGRFTISRDNAKTTLYLQMNSLRPEDTAVYYCTIGGSLSRSSQGTLVTVSS

SEQ ID NO: 532 - protein, 387 aa, Artificial
  Nanobody sequence
EVQLVESGGGLVQPGGSLRLSCAASGFTFDDYGMSWVRQAPGKGTEWVSAISWNGNNTYYTESMKGRFTISRDNAKNTLYLQMNSLRPEDTAVYYCVKGSTAIVGVPPTYPDEYDYWGQGTLVTVSSGGGGSGGGSEVQLVESGGGLVQPGGSLRLSCAASGFTFDDYGMSWVRQAPGKGTEWVSAISWNGNNTYYTESMKGRFTISRDNAKNTLYLQMNSLRPEDTAVYYCVKGSTAIVGVPPTYPDEYDYWGQGTLVTVSSGGGGSGGGSEVQLVESGGGLVQPGNSLRLSCAASGFTFSSFGMSWVRQAPGKGLEWVSSISGSGSDTLYADSVKGRFTISRDNAKTTLYLQMNSLRPEDTAVYYCTIGGSLSRSSQGTLVTVSS

SEQ ID NO: 533 - protein, 387 aa, Artificial
  Nanobody sequence
EVQLVESGGGLVQPGGSLRLSCAASGFTFDDYGMSWVRQAPGRGTEWVSAISWNGNNTYYTESMKGRFTISRDNAKNTLYLQMNSLRPEDTAVYYCVKGSTAIVGVPPTYPDEYDYWGQGTLVTVSSGGGGSGGGSEVQLVESGGGLVQPGGSLRLSCAASGFTFDDYGMSWVRQAPGRGTEWVSAISWNGNNTYYTESMKGRFTISRDNAKNTLYLQMNSLRPEDTAVYYCVKGSTAIVGVPPTYPDEYDYWGQGTLVTVSSGGGGSGGGSEVQLVESGGGLVQPGNSLRLSCAASGFTFSSFGMSWVRQAPGKGLEWVSSISGSGSDTLYADSVKGRFTISRDNAKTTLYLQMNSLRPEDTAVYYCTIGGSLSRSSQGTLVTVSS

SEQ ID NO: 534 - protein, 387 aa, Artificial
  Nanobody sequence
EVQLVESGGGLVQPGGSLRLSCAASGFTFDDYGMSWVRQAPGKALEWVSAISWNGNNTYYTESMKGRFTISRDNAKNTLYLQMNSLRPEDTAVYYCVKGSTAIVGVPPTYPDEYDYWGQGTLVTVSSGGGGSGGGSEVQLVESGGGLVQPGGSLRLSCAASGFTFDDYGMSWVRQAPGKALEWVSAISWNGNNTYYTESMKGRFTISRDNAKNTLYLQMNSLRPEDTAVYYCVKGSTAIVGVPPTYPDEYDYWGQGTLVTVSSGGGGSGGGSEVQLVESGGGLVQPGNSLRLSCAASGFTFSSFGMSWVRQAPGKGLEWVSSISGSGSDTLYADSVKGRFTISRDNAKTTLYLQMNSLRPEDTAVYYCTIGGSLSRSSQGTLVTVSS

SEQ ID NO: 535 - protein, 387 aa, Artificial
  Nanobody sequence
EVQLVESGGGLVQPGGSLRLSCAASGFTFSDYGMSWVRQAPGKGTEWVSAISWNGNNTYYTESMKGRFTISRDNAKNTLYLQMNSLRPEDTAVYYCVKGSTAIVGVPPTYPDEYDYWGQGTLVTVSSGGGGSGGGSEVQLVESGGGLVQPGGSLRLSCAASGFTFSDYGMSWVRQAPGKGTEWVSAISWNGNNTYYTESMKGRFTISRDNAKNTLYLQMNSLRPEDTAVYYCVKGSTAIVGVPPTYPDEYDYWGQGTLVTVSSGGGGSGGGSEVQLVESGGGLVQPGNSLRLSCAASGFTFSSFGMSWVRQAPGKGLEWVSSISGSGSDTLYADSVKGRFTISRDNAKTTLYLQMNSLRPEDTAVYYCTIGGSLSRSSQGTLVTVSS

SEQ ID NO: 536 - protein, 387 aa, Artificial
  Nanobody sequence
EVQLVESGGGLVQPGGSLRLSCAASGFTFSDYGMSWVRQAPGKGTEWVSAISWNGNNTYYTESMKGRFTISRDNAKNTLYLQMNSLRPEDTAVYYCAKGSTAIVGVPPTYPDEYDYWGQGTLVTVSSGGGGSGGGSEVQLVESGGGLVQPGGSLRLSCAASGFTFSDYGMSWVRQAPGKGTEWVSAISWNGNNTYYTESMKGRFTISRDNAKNTLYLQMNSLRPEDTAVYYCAKGSTAIVGVPPTYPDEYDYWGQGTLVTVSSGGGGSGGGSEVQLVESGGGLVQPGNSLRLSCAASGFTFSSFGMSWVRQAPGKGLEWVSSISGSGSDTLYADSVKGRFTISRDNAKTTLYLQMNSLRPEDTAVYYCTIGGSLSRSSQGTLVTVSS

SEQ ID NO: 537 - protein, 375 aa, Artificial
  Nanobody sequence
EVQLVESGGGLVQPGNSLRLSCAASGFTFSSFGMSWVRQAPGKGLEWVSSISGSGSDTLYADSVKGRFTISRDNAKTTLYLQMNSLRPEDTAVYYCTIGGSLSRSSQGTLVTVSSGGGGSGGGSEVQLVESGGGLVQPGGSLRLSCAASGSIFKVNAMGWYRQAPGKGRELVAGIISGGSTNYADSVKGRLTISRDNAKNTVYLQMNSLRPEDTAVYYCSFVTTNSDYDLGRDYWGQGTLVTVSSGGGGSGGGSEVQLVESGGGLVQPGGSLRLSCAASGSIFKVNAMGWYRQAPGKGRELVAGIISGGSTNYADSVKGRLTISRDNAKNTVYLQMNSLRPEDTAVYYCSFVTTNSDYDLGRDYWGQGTLVTVSS

SEQ ID NO: 538 - protein, 375 aa, Artificial
  Nanobody sequence
EVQLVESGGGLVQPGNSLRLSCAASGFTFSSFGMSWVRQAPGKGLEWVSSISGSGSDTLYADSVKGRFTISRDNAKTTLYLQMNSLRPEDTAVYYCTIGGSLSRSSQGTLVTVSSGGGGSGGGSEVQLVESGGGLVQPGGSLRLSCAASGSIFKVNAMGWYRQAPGKGRELVAGIISGGSTNYADSVKGRFTISRDNAKNTVYLQMNSLRPEDTAVYYCSFVTTNSDYDLGRDYWGQGTLVTVSSGGGGSGGGSEVQLVESGGGLVQPGGSLRLSCAASGSIFKVNAMGWYRQAPGKGRELVAGIISGGSTNYADSVKGRFTISRDNAKNTVYLQMNSLRPEDTAVYYCSFVTTNSDYDLGRDYWGQGTLVTVSS

SEQ ID NO: 539 - protein, 375 aa, Artificial
  Nanobody sequence
EVQLVESGGGLVQPGNSLRLSCAASGFTFSSFGMSWVRQAPGKGLEWVSSISGSGSDTLYADSVKGRFTISRDNAKTTLYLQMNSLRPEDTAVYYCTIGGSLSRSSQGTLVTVSSGGGGSGGGSEVQLVESGGGLVQPGGSLRLSCAASGSIFKVNAMGWYRQAPGKGRELVAGIISGGSTNYADSVKGRLTISRDNAKNTLYLQMNSLRPEDTAVYYCSFVTTNSDYDLGRDYWGQGTLVTVSSGGGGSGGGSEVQLVESGGGLVQPGGSLRLSCAASGSIFKVNAMGWYRQAPGKGRELVAGIISGGSTNYADSVKGRLTISRDNAKNTLYLQMNSLRPEDTAVYYCSFVTTNSDYDLGRDYWGQGTLVTVSS

SEQ ID NO: 540 - protein, 375 aa, Artificial
  Nanobody sequence
EVQLVESGGGLVQPGNSLRLSCAASGFTFSSFGMSWVRQAPGKGLEWVSSISGSGSDTLYADSVKGRFTISRDNAKTTLYLQMNSLRPEDTAVYYCTIGGSLSRSSQGTLVTVSSGGGGSGGGSEVQLVESGGGLVQPGGSLRLSCAASGSIFKVNAMGWYRQAPGKGRELVAGIISGGSTNYADSVKGRLTISRDNAKNTVYLQMNSLRPEDTAVYYCAFVTTNSDYDLGRDYWGQGTLVTVSSGGGGSGGGSEVQLVESGGGLVQPGGSLRLSCAASGSIFKVNAMGWYRQAPGKGRELVAGIISGGSTNYADSVKGRLTISRDNAKNTVYLQMNSLRPEDTAVYYCAFVTTNSDYDLGRDYWGQGTLVTVSS

SEQ ID NO: 541 - protein, 375 aa, Artificial
  Nanobody sequence
EVQLVESGGGLVQPGNSLRLSCAASGFTFSSFGMSWVRQAPGKGLEWVSSISGSGSDTLYADSVKGRFTISRDNAKTTLYLQMNSLRPEDTAVYYCTIGGSLSRSSQGTLVTVSSGGGGSGGGSEVQLVESGGGLVQPGGSLRLSCAASGSIFKVNAMGWYRQAPGKGRELVAGIISGGSTNYADSVKGRFTISRDNAKNTLYLQMNSLRPEDTAVYYCAFVTTNSDYDLGRDYWGQGTLVTVSSGGGGSGGGSEVQLVESGGGLVQPGGSLRLSCAASGSIFKVNAMGWYRQAPGKGRELVAGIISGGSTNYADSVKGRFTISRDNAKNTLYLQMNSLRPEDTAVYYCAFVTTNSDYDLGRDYWGQGTLVTVSS

SEQ ID NO: 542 - protein, 387 aa, Artificial
  Nanobody sequence
EVQLVESGGGLVQPGNSLRLSCAASGFTFSSFGMSWVRQAPGKGLEWVSSISGSGSDTLYADSVKGRFTISRDNAKTTLYLQMNSLRPEDTAVYYCTIGGSLSRSSQGTLVTVSSGGGGSGGGSEVQLVESGGGLVQPGGSLRLSCAASGFTFDDYDIGWFRQAPGKGREGVSGISSSDGNTYYADSVKGRFTISSDNAKNTVYLQMNSLRPEDTAVYYCAAEPPDSSWYLDGSPEFFKYWGQGTLVTVSSGGGGSGGGSEVQLVESGGGLVQPGGSLRLSCAASGFTFDDYDIGWFRQAPGKGREGVSGISSSDGNTYYADSVKGRFTISSDNAKNTVYLQMNSLRPEDTAVYYCAAEPPDSSWYLDGSPEFFKYWGQGTLVTVSS

SEQ ID NO: 543 - protein, 387 aa, Artificial
  Nanobody sequence
EVQLVESGGGLVQPGNSLRLSCAASGFTFSSFGMSWVRQAPGKGLEWVSSISGSGSDTLYADSVKGRFTISRDNAKTTLYLQMNSLRPEDTAVYYCTIGGSLSRSSQGTLVTVSSGGGGSGGGSEVQLVESGGGLVQPGGSLRLSCAASGFTFSDYDIGWFRQAPGKGREGVSGISSSDGNTYYADSVKGRFTISSDNAKNTVYLQMNSLRPEDTAVYYCAAEPPDSSWYLDGSPEFFKYWGQGTLVTVSSGGGGSGGGSEVQLVESGGGLVQPGGSLRLSCAASGFTFSDYDIGWFRQAPGKGREGVSGISSSDGNTYYADSVKGRFTISSDNAKNTVYLQMNSLRPEDTAVYYCAAEPPDSSWYLDGSPEFFKYWGQGTLVTVSS

SEQ ID NO: 544 - protein, 387 aa, Artificial
  Nanobody sequence
EVQLVESGGGLVQPGNSLRLSCAASGFTFSSFGMSWVRQAPGKGLEWVSSISGSGSDTLYADSVKGRFTISRDNAKTTLYLQMNSLRPEDTAVYYCTIGGSLSRSSQGTLVTVSSGGGGSGGGSEVQLVESGGGLVQPGGSLRLSCAASGFTFDDYDIGWFRQAPGKGREGVSGISSSDGNTYYADSVKGRFTISRDNAKNTVYLQMNSLRPEDTAVYYCAAEPPDSSWYLDGSPEFFKYWGQGTLVTVSSGGGGSGGGSEVQLVESGGGLVQPGGSLRLSCAASGFTFDDYDIGWFRQAPGKGREGVSGISSSDGNTYYADSVKGRFTISRDNAKNTVYLQMNSLRPEDTAVYYCAAEPPDSSWYLDGSPEFFKYWGQGTLVTVSS

SEQ ID NO: 545 - protein, 387 aa, Artificial
  Nanobody sequence
EVQLVESGGGLVQPGNSLRLSCAASGFTFSSFGMSWVRQAPGKGLEWVSSISGSGSDTLYADSVKGRFTISRDNAKTTLYLQMNSLRPEDTAVYYCTIGGSLSRSSQGTLVTVSSGGGGSGGGSEVQLVESGGGLVQPGGSLRLSCAASGFTFDDYDIGWFRQAPGKGREGVSGISSSDGNTYYADSVKGRFTISSDNAKNTLYLQMNSLRPEDTAVYYCAAEPPDSSWYLDGSPEFFKYWGQGTLVTVSSGGGGSGGGSEVQLVESGGGLVQPGGSLRLSCAASGFTFDDYDIGWFRQAPGKGREGVSGISSSDGNTYYADSVKGRFTISSDNAKNTLYLQMNSLRPEDTAVYYCAAEPPDSSWYLDGSPEFFKYWGQGTLVTVSS

SEQ ID NO: 546 - protein, 387 aa, Artificial
  Nanobody sequence
EVQLVESGGGLVQPGNSLRLSCAASGFTFSSFGMSWVRQAPGKGLEWVSSISGSGSDTLYADSVKGRFTISRDNAKTTLYLQMNSLRPEDTAVYYCTIGGSLSRSSQGTLVTVSSGGGGSGGGSEVQLVESGGGLVQPGGSLRLSCAASGFTFSDYDIGWFRQAPGKGREGVSGISSSDGNTYYADSVKGRFTISRDNAKNTLYLQMNSLRPEDTAVYYCAAEPPDSSWYLDGSPEFFKYWGQGTLVTVSSGGGGSGGGSEVQLVESGGGLVQPGGSLRLSCAASGFTFSDYDIGWFRQAPGKGREGVSGISSSDGNTYYADSVKGRFTISRDNAKNTLYLQMNSLRPEDTAVYYCAAEPPDSSWYLDGSPEFFKYWGQGTLVTVSS

SEQ ID NO: 547 - protein, 387 aa, Artificial
  Nanobody sequence
EVQLVESGGGLVQPGNSLRLSCAASGFTFSSFGMSWVRQAPGKGLEWVSSISGSGSDTLYADSVKGRFTISRDNAKTTLYLQMNSLRPEDTAVYYCTIGGSLSRSSQGTLVTVSSGGGGSGGGSEVQLVESGGGLVQPGGSLRLSCAASGFTFDDYGMSWVRQAPGRATEWVSAISWNGNNTYYTESMKGRFTISRDNAKNTVYLQMNSLRPEDTAVYYCVKGSTAIVGVPPTYPDEYDYWGQGTLVTVSSGGGGSGGGSEVQLVESGGGLVQPGGSLRLSCAASGFTFDDYGMSWVRQAPGRATEWVSAISWNGNNTYYTESMKGRFTISRDNAKNTVYLQMNSLRPEDTAVYYCVKGSTAIVGVPPTYPDEYDYWGQGTLVTVSS

SEQ ID NO: 548 - protein, 387 aa, Artificial
  Nanobody sequence
EVQLVESGGGLVQPGNSLRLSCAASGFTFSSFGMSWVRQAPGKGLEWVSSISGSGSDTLYADSVKGRFTISRDNAKTTLYLQMNSLRPEDTAVYYCTIGGSLSRSSQGTLVTVSSGGGGSGGGSEVQLVESGGGLVQPGGSLRLSCAASGFTFDDYGMSWVRQAPGKGLEWVSAISWNGNNTYYTESMKGRFTISRDNAKNTVYLQMNSLRPEDTAVYYCVKGSTAIVGVPPTYPDEYDYWGQGTLVTVSSGGGGSGGGSEVQLVESGGGLVQPGGSLRLSCAASGFTFDDYGMSWVRQAPGKGLEWVSAISWNGNNTYYTESMKGRFTISRDNAKNTVYLQMNSLRPEDTAVYYCVKGSTAIVGVPPTYPDEYDYWGQGTLVTVSS

SEQ ID NO: 549 - protein, 387 aa, Artificial
  Nanobody sequence
EVQLVESGGGLVQPGNSLRLSCAASGFTFSSFGMSWVRQAPGKGLEWVSSISGSGSDTLYADSVKGRFTISRDNAKTTLYLQMNSLRPEDTAVYYCTIGGSLSRSSQGTLVTVSSGGGGSGGGSEVQLVESGGGLVQPGGSLRLSCAASGFTFDDYGMSWVRQAPGRATEWVSAISWNGNNTYYTESMKGRFTISRDNAKNTLYLQMNSLRPEDTAVYYCVKGSTAIVGVPPTYPDEYDYWGQGTLVTVSSGGGGSGGGSEVQLVESGGGLVQPGGSLRLSCAASGFTFDDYGMSWVRQAPGRATEWVSAISWNGNNTYYTESMKGRFTISRDNAKNTLYLQMNSLRPEDTAVYYCVKGSTAIVGVPPTYPDEYDYWGQGTLVTVSS

SEQ ID NO: 550 - protein, 387 aa, Artificial
  Nanobody sequence
EVQLVESGGGLVQPGNSLRLSCAASGFTFSSFGMSWVRQAPGKGLEWVSSISGSGSDTLYADSVKGRFTISRDNAKTTLYLQMNSLRPEDTAVYYCTIGGSLSRSSQGTLVTVSSGGGGSGGGSEVQLVESGGGLVQPGGSLRLSCAASGFTFDDYGMSWVRQAPGKGLEWVSAISWNGNNTYYTESMKGRFTISRDNAKNTLYLQMNSLRPEDTAVYYCVKGSTAIVGVPPTYPDEYDYWGQGTLVTVSSGGGGSGGGSEVQLVESGGGLVQPGGSLRLSCAASGFTFDDYGMSWVRQAPGKGLEWVSAISWNGNNTYYTESMKGRFTISRDNAKNTLYLQMNSLRPEDTAVYYCVKGSTAIVGVPPTYPDEYDYWGQGTLVTVSS

SEQ ID NO: 551 - protein, 387 aa, Artificial
  Nanobody sequence
EVQLVESGGGLVQPGNSLRLSCAASGFTFSSFGMSWVRQAPGKGLEWVSSISGSGSDTLYADSVKGRFTISRDNAKTTLYLQMNSLRPEDTAVYYCTIGGSLSRSSQGTLVTVSSGGGGSGGGSEVQLVESGGGLVQPGGSLRLSCAASGFTFDDYGMSWVRQAPGRGLEWVSAISWNGNNTYYTESMKGRFTISRDNAKNTLYLQMNSLRPEDTAVYYCVKGSTAIVGVPPTYPDEYDYWGQGTLVTVSSGGGGSGGGSEVQLVESGGGLVQPGGSLRLSCAASGFTFDDYGMSWVRQAPGRGLEWVSAISWNGNNTYYTESMKGRFTISRDNAKNTLYLQMNSLRPEDTAVYYCVKGSTAIVGVPPTYPDEYDYWGQGTLVTVSS

SEQ ID NO: 552 - protein, 387 aa, Artificial
  Nanobody sequence
EVQLVESGGGLVQPGNSLRLSCAASGFTFSSFGMSWVRQAPGKGLEWVSSISGSGSDTLYADSVKGRFTISRDNAKTTLYLQMNSLRPEDTAVYYCTIGGSLSRSSQGTLVTVSSGGGGSGGGSEVQLVESGGGLVQPGGSLRLSCAASGFTFDDYGMSWVRQAPGRALEWVSAISWNGNNTYYTESMKGRFTISRDNAKNTLYLQMNSLRPEDTAVYYCVKGSTAIVGVPPTYPDEYDYWGQGTLVTVSSGGGGSGGGSEVQLVESGGGLVQPGGSLRLSCAASGFTFDDYGMSWVRQAPGRALEWVSAISWNGNNTYYTESMKGRFTISRDNAKNTLYLQMNSLRPEDTAVYYCVKGSTAIVGVPPTYPDEYDYWGQGTLVTVSS

SEQ ID NO: 553 - protein, 387 aa, Artificial
  Nanobody sequence
EVQLVESGGGLVQPGNSLRLSCAASGFTFSSFGMSWVRQAPGKGLEWVSSISGSGSDTLYADSVKGRFTISRDNAKTTLYLQMNSLRPEDTAVYYCTIGGSLSRSSQGTLVTVSSGGGGSGGGSEVQLVESGGGLVQPGGSLRLSCAASGFTFDDYGMSWVRQAPGKATEWVSAISWNGNNTYYTESMKGRFTISRDNAKNTLYLQMNSLRPEDTAVYYCVKGSTAIVGVPPTYPDEYDYWGQGTLVTVSSGGGGSGGGSEVQLVESGGGLVQPGGSLRLSCAASGFTFDDYGMSWVRQAPGKATEWVSAISWNGNNTYYTESMKGRFTISRDNAKNTLYLQMNSLRPEDTAVYYCVKGSTAIVGVPPTYPDEYDYWGQGTLVTVSS

SEQ ID NO: 554 - protein, 387 aa, Artificial
  Nanobody sequence
EVQLVESGGGLVQPGNSLRLSCAASGFTFSSFGMSWVRQAPGKGLEWVSSISGSGSDTLYADSVKGRFTISRDNAKTTLYLQMNSLRPEDTAVYYCTIGGSLSRSSQGTLVTVSSGGGGSGGGSEVQLVESGGGLVQPGGSLRLSCAASGFTFDDYGMSWVRQAPGKGTEWVSAISWNGNNTYYTESMKGRFTISRDNAKNTLYLQMNSLRPEDTAVYYCVKGSTAIVGVPPTYPDEYDYWGQGTLVTVSSGGGGSGGGSEVQLVESGGGLVQPGGSLRLSCAASGFTFDDYGMSWVRQAPGKGTEWVSAISWNGNNTYYTESMKGRFTISRDNAKNTLYLQMNSLRPEDTAVYYCVKGSTAIVGVPPTYPDEYDYWGQGTLVTVSS

SEQ ID NO: 555 - protein, 387 aa, Artificial
  Nanobody sequence
EVQLVESGGGLVQPGNSLRLSCAASGFTFSSFGMSWVRQAPGKGLEWVSSISGSGSDTLYADSVKGRFTISRDNAKTTLYLQMNSLRPEDTAVYYCTIGGSLSRSSQGTLVTVSSGGGGSGGGSEVQLVESGGGLVQPGGSLRLSCAASGFTFDDYGMSWVRQAPGRGTEWVSAISWNGNNTYYTESMKGRFTISRDNAKNTLYLQMNSLRPEDTAVYYCVKGSTAIVGVPPTYPDEYDYWGQGTLVTVSSGGGGSGGGSEVQLVESGGGLVQPGGSLRLSCAASGFTFDDYGMSWVRQAPGRGTEWVSAISWNGNNTYYTESMKGRFTISRDNAKNTLYLQMNSLRPEDTAVYYCVKGSTAIVGVPPTYPDEYDYWGQGTLVTVSS

SEQ ID NO: 556 - protein, 387 aa, Artificial
  Nanobody sequence
EVQLVESGGGLVQPGNSLRLSCAASGFTFSSFGMSWVRQAPGKGLEWVSSISGSGSDTLYADSVKGRFTISRDNAKTTLYLQMNSLRPEDTAVYYCTIGGSLSRSSQGTLVTVSSGGGGSGGGSEVQLVESGGGLVQPGGSLRLSCAASGFTFDDYGMSWVRQAPGKALEWVSAISWNGNNTYYTESMKGRFTISRDNAKNTLYLQMNSLRPEDTAVYYCVKGSTAIVGVPPTYPDEYDYWGQGTLVTVSSGGGGSGGGSEVQLVESGGGLVQPGGSLRLSCAASGFTFDDYGMSWVRQAPGKALEWVSAISWNGNNTYYTESMKGRFTISRDNAKNTLYLQMNSLRPEDTAVYYCVKGSTAIVGVPPTYPDEYDYWGQGTLVTVSS

SEQ ID NO: 557 - protein, 387 aa, Artificial
  Nanobody sequence
EVQLVESGGGLVQPGNSLRLSCAASGFTFSSFGMSWVRQAPGKGLEWVSSISGSGSDTLYADSVKGRFTISRDNAKTTLYLQMNSLRPEDTAVYYCTIGGSLSRSSQGTLVTVSSGGGGSGGGSEVQLVESGGGLVQPGGSLRLSCAASGFTFSDYGMSWVRQAPGKGTEWVSAISWNGNNTYYTESMKGRFTISRDNAKNTLYLQMNSLRPEDTAVYYCVKGSTAIVGVPPTYPDEYDYWGQGTLVTVSSGGGGSGGGSEVQLVESGGGLVQPGGSLRLSCAASGFTFSDYGMSWVRQAPGKGTEWVSAISWNGNNTYYTESMKGRFTISRDNAKNTLYLQMNSLRPEDTAVYYCVKGSTAIVGVPPTYPDEYDYWGQGTLVTVSS

SEQ ID NO: 558 - protein, 387 aa, Artificial
  Nanobody sequence
EVQLVESGGGLVQPGNSLRLSCAASGFTFSSFGMSWVRQAPGKGLEWVSSISGSGSDTLYADSVKGRFTISRDNAKTTLYLQMNSLRPEDTAVYYCTIGGSLSRSSQGTLVTVSSGGGGSGGGSEVQLVESGGGLVQPGGSLRLSCAASGFTFSDYGMSWVRQAPGKGTEWVSAISWNGNNTYYTESMKGRFTISRDNAKNTLYLQMNSLRPEDTAVYYCAKGSTAIVGVPPTYPDEYDYWGQGTLVTVSSGGGGSGGGSEVQLVESGGGLVQPGGSLRLSCAASGFTFSDYGMSWVRQAPGKGTEWVSAISWNGNNTYYTESMKGRFTISRDNAKNTLYLQMNSLRPEDTAVYYCAKGSTAIVGVPPTYPDEYDYWGQGTLVTVSS

SEQ ID NO: 559 - protein, 245 aa, Artificial
  Nanobody sequence
EVQLVESGGGLVQPGGSLRLSCAASGSIFKVNAMGWYRQAPGKGRELVAGIISGGSTNYADSVKGRLTISRDNAKNTVYLQMNSLRPEDTAVYYCSFVTTNSDYDLGRDYWGQGTLVTVSSGGGGSGGGSEVQLVESGGGLVQPGNSLRLSCAASGFTFSSFGMSWVRQAPGKGLEWVSSISGSGSDTLYADSVKGRFTISRDNAKTTLYLQMNSLRPEDTAVYYCTIGGSLSRSSQGTLVTVSS

SEQ ID NO: 560 - protein, 245 aa, Artificial
  Nanobody sequence
EVQLVESGGGLVQPGGSLRLSCAASGSIFKVNAMGWYRQAPGKGRELVAGIISGGSTNYADSVKGRFTISRDNAKNTVYLQMNSLRPEDTAVYYCSFVTTNSDYDLGRDYWGQGTLVTVSSGGGGSGGGSEVQLVESGGGLVQPGNSLRLSCAASGFTFSSFGMSWVRQAPGKGLEWVSSISGSGSDTLYADSVKGRFTISRDNAKTTLYLQMNSLRPEDTAVYYCTIGGSLSRSSQGTLVTVSS

SEQ ID NO: 561 - protein, 245 aa, Artificial
  Nanobody sequence
EVQLVESGGGLVQPGGSLRLSCAASGSIFKVNAMGWYRQAPGKGRELVAGIISGGSTNYADSVKGRLTISRDNAKNTLYLQMNSLRPEDTAVYYCSFVTTNSDYDLGRDYWGQGTLVTVSSGGGGSGGGSEVQLVESGGGLVQPGNSLRLSCAASGFTFSSFGMSWVRQAPGKGLEWVSSISGSGSDTLYADSVKGRFTISRDNAKTTLYLQMNSLRPEDTAVYYCTIGGSLSRSSQGTLVTVSS

SEQ ID NO: 562 - protein, 245 aa, Artificial
  Nanobody sequence
EVQLVESGGGLVQPGGSLRLSCAASGSIFKVNAMGWYRQAPGKGRELVAGIISGGSTNYADSVKGRLTISRDNAKNTVYLQMNSLRPEDTAVYYCAFVTTNSDYDLGRDYWGQGTLVTVSSGGGGSGGGSEVQLVESGGGLVQPGNSLRLSCAASGFTFSSFGMSWVRQAPGKGLEWVSSISGSGSDTLYADSVKGRFTISRDNAKTTLYLQMNSLRPEDTAVYYCTIGGSLSRSSQGTLVTVSS

SEQ ID NO: 563 - protein, 245 aa, Artificial
  Nanobody sequence
EVQLVESGGGLVQPGGSLRLSCAASGSIFKVNAMGWYRQAPGKGRELVAGIISGGSTNYADSVKGRFTISRDNAKNTLYLQMNSLRPEDTAVYYCAFVTTNSDYDLGRDYWGQGTLVTVSSGGGGSGGGSEVQLVESGGGLVQPGNSLRLSCAASGFTFSSFGMSWVRQAPGKGLEWVSSISGSGSDTLYADSVKGRFTISRDNAKTTLYLQMNSLRPEDTAVYYCTIGGSLSRSSQGTLVTVSS

SEQ ID NO: 564 - protein, 251 aa, Artificial
  Nanobody sequence
EVQLVESGGGLVQPGGSLRLSCAASGFTFDDYDIGWFRQAPGKGREGVSGISSSDGNTYYADSVKGRFTISSDNAKNTVYLQMNSLRPEDTAVYYCAAEPPDSSWYLDGSPEFFKYWGQGTLVTVSSGGGGSGGGSEVQLVESGGGLVQPGNSLRLSCAASGFTFSSFGMSWVRQAPGKGLEWVSSISGSGSDTLYADSVKGRFTISRDNAKTTLYLQMNSLRPEDTAVYYCTIGGSLSRSSQGTLVTVSS

SEQ ID NO: 565 - protein, 251 aa, Artificial
  Nanobody sequence
EVQLVESGGGLVQPGGSLRLSCAASGFTFSDYDIGWFRQAPGKGREGVSGISSSDGNTYYADSVKGRFTISSDNAKNTVYLQMNSLRPEDTAVYYCAAEPPDSSWYLDGSPEFFKYWGQGTLVTVSSGGGGSGGGSEVQLVESGGGLVQPGNSLRLSCAASGFTFSSFGMSWVRQAPGKGLEWVSSISGSGSDTLYADSVKGRFTISRDNAKTTLYLQMNSLRPEDTAVYYCTIGGSLSRSSQGTLVTVSS

SEQ ID NO: 566 - protein, 251 aa, Artificial
  Nanobody sequence
EVQLVESGGGLVQPGGSLRLSCAASGFTFDDYDIGWFRQAPGKGREGVSGISSSDGNTYYADSVKGRFTISRDNAKNTVYLQMNSLRPEDTAVYYCAAEPPDSSWYLDGSPEFFKYWGQGTLVTVSSGGGGSGGGSEVQLVESGGGLVQPGNSLRLSCAASGFTFSSFGMSWVRQAPGKGLEWVSSISGSGSDTLYADSVKGRFTISRDNAKTTLYLQMNSLRPEDTAVYYCTIGGSLSRSSQGTLVTVSS

SEQ ID NO: 567 - protein, 251 aa, Artificial
  Nanobody sequence
EVQLVESGGGLVQPGGSLRLSCAASGFTFDDYDIGWFRQAPGKGREGVSGISSSDGNTYYADSVKGRFTISSDNAKNTLYLQMNSLRPEDTAVYYCAAEPPDSSWYLDGSPEFFKYWGQGTLVTVSSGGGGSGGGSEVQLVESGGGLVQPGNSLRLSCAASGFTFSSFGMSWVRQAPGKGLEWVSSISGSGSDTLYADSVKGRFTISRDNAKTTLYLQMNSLRPEDTAVYYCTIGGSLSRSSQGTLVTVSS

SEQ ID NO: 568 - protein, 251 aa, Artificial
  Nanobody sequence
EVQLVESGGGLVQPGGSLRLSCAASGFTFSDYDIGWFRQAPGKGREGVSGISSSDGNTYYADSVKGRFTISRDNAKNTLYLQMNSLRPEDTAVYYCAAEPPDSSWYLDGSPEFFKYWGQGTLVTVSSGGGGSGGGSEVQLVESGGGLVQPGNSLRLSCAASGFTFSSFGMSWVRQAPGKGLEWVSSISGSGSDTLYADSVKGRFTISRDNAKTTLYLQMNSLRPEDTAVYYCTIGGSLSRSSQGTLVTVSS

SEQ ID NO: 569 - protein, 251 aa, Artificial
  Nanobody sequence
EVQLVESGGGLVQPGGSLRLSCAASGFTFDDYGMSWVRQAPGRATEWVSAISWNGNNTYYTESMKGRFTISRDNAKNTVYLQMNSLRPEDTAVYYCVKGSTAIVGVPPTYPDEYDYWGQGTLVTVSSGGGGSGGGSEVQLVESGGGLVQPGNSLRLSCAASGFTFSSFGMSWVRQAPGKGLEWVSSISGSGSDTLYADSVKGRFTISRDNAKTTLYLQMNSLRPEDTAVYYCTIGGSLSRSSQGTLVTVSS

SEQ ID NO: 570 - protein, 251 aa, Artificial
  Nanobody sequence
EVQLVESGGGLVQPGGSLRLSCAASGFTFDDYGMSWVRQAPGKGLEWVSAISWNGNNTYYTESMKGRFTISRDNAKNTVYLQMNSLRPEDTAVYYCVKGSTAIVGVPPTYPDEYDYWGQGTLVTVSSGGGGSGGGSEVQLVESGGGLVQPGNSLRLSCAASGFTFSSFGMSWVRQAPGKGLEWVSSISGSGSDTLYADSVKGRFTISRDNAKTTLYLQMNSLRPEDTAVYYCTIGGSLSRSSQGTLVTVSS

SEQ ID NO: 571 - protein, 251 aa, Artificial
  Nanobody sequence
EVQLVESGGGLVQPGGSLRLSCAASGFTFDDYGMSWVRQAPGRATEWVSAISWNGNNTYYTESMKGRFTISRDNAKNTLYLQMNSLRPEDTAVYYCVKGSTAIVGVPPTYPDEYDYWGQGTLVTVSSGGGGSGGGSEVQLVESGGGLVQPGNSLRLSCAASGFTFSSFGMSWVRQAPGKGLEWVSSISGSGSDTLYADSVKGRFTISRDNAKTTLYLQMNSLRPEDTAVYYCTIGGSLSRSSQGTLVTVSS

SEQ ID NO: 572 - protein, 251 aa, Artificial
  Nanobody sequence
EVQLVESGGGLVQPGGSLRLSCAASGFTFDDYGMSWVRQAPGKGLEWVSAISWNGNNTYYTESMKGRFTISRDNAKNTLYLQMNSLRPEDTAVYYCVKGSTAIVGVPPTYPDEYDYWGQGTLVTVSSGGGGSGGGSEVQLVESGGGLVQPGNSLRLSCAASGFTFSSFGMSWVRQAPGKGLEWVSSISGSGSDTLYADSVKGRFTISRDNAKTTLYLQMNSLRPEDTAVYYCTIGGSLSRSSQGTLVTVSS

SEQ ID NO: 573 - protein, 251 aa, Artificial
  Nanobody sequence
EVQLVESGGGLVQPGGSLRLSCAASGFTFDDYGMSWVRQAPGRGLEWVSAISWNGNNTYYTESMKGRFTISRDNAKNTLYLQMNSLRPEDTAVYYCVKGSTAIVGVPPTYPDEYDYWGQGTLVTVSSGGGGSGGGSEVQLVESGGGLVQPGNSLRLSCAASGFTFSSFGMSWVRQAPGKGLEWVSSISGSGSDTLYADSVKGRFTISRDNAKTTLYLQMNSLRPEDTAVYYCTIGGSLSRSSQGTLVTVSS

SEQ ID NO: 574 - protein, 251 aa, Artificial
  Nanobody sequence
EVQLVESGGGLVQPGGSLRLSCAASGFTFDDYGMSWVRQAPGRALEWVSAISWNGNNTYYTESMKGRFTISRDNAKNTLYLQMNSLRPEDTAVYYCVKGSTAIVGVPPTYPDEYDYWGQGTLVTVSSGGGGSGGGSEVQLVESGGGLVQPGNSLRLSCAASGFTFSSFGMSWVRQAPGKGLEWVSSISGSGSDTLYADSVKGRFTISRDNAKTTLYLQMNSLRPEDTAVYYCTIGGSLSRSSQGTLVTVSS

SEQ ID NO: 575 - protein, 251 aa, Artificial
  Nanobody sequence
EVQLVESGGGLVQPGGSLRLSCAASGFTFDDYGMSWVRQAPGKATEWVSAISWNGNNTYYTESMKGRFTISRDNAKNTLYLQMNSLRPEDTAVYYCVKGSTAIVGVPPTYPDEYDYWGQGTLVTVSSGGGGSGGGSEVQLVESGGGLVQPGNSLRLSCAASGFTFSSFGMSWVRQAPGKGLEWVSSISGSGSDTLYADSVKGRFTISRDNAKTTLYLQMNSLRPEDTAVYYCTIGGSLSRSSQGTLVTVSS

SEQ ID NO: 576 - protein, 251 aa, Artificial
  Nanobody sequence
EVQLVESGGGLVQPGGSLRLSCAASGFTFDDYGMSWVRQAPGKGTEWVSAISWNGNNTYYTESMKGRFTISRDNAKNTLYLQMNSLRPEDTAVYYCVKGSTAIVGVPPTYPDEYDYWGQGTLVTVSSGGGGSGGGSEVQLVESGGGLVQPGNSLRLSCAASGFTFSSFGMSWVRQAPGKGLEWVSSISGSGSDTLYADSVKGRFTISRDNAKTTLYLQMNSLRPEDTAVYYCTIGGSLSRSSQGTLVTVSS

SEQ ID NO: 577 - protein, 251 aa, Artificial
  Nanobody sequence
EVQLVESGGGLVQPGGSLRLSCAASGFTFDDYGMSWVRQAPGRGTEWVSAISWNGNNTYYTESMKGRFTISRDNAKNTLYLQMNSLRPEDTAVYYCVKGSTAIVGVPPTYPDEYDYWGQGTLVTVSSGGGGSGGGSEVQLVESGGGLVQPGNSLRLSCAASGFTFSSFGMSWVRQAPGKGLEWVSSISGSGSDTLYADSVKGRFTISRDNAKTTLYLQMNSLRPEDTAVYYCTIGGSLSRSSQGTLVTVSS

SEQ ID NO: 578 - protein, 251 aa, Artificial
  Nanobody sequence
EVQLVESGGGLVQPGGSLRLSCAASGFTFDDYGMSWVRQAPGKALEWVSAISWNGNNTYYTESMKGRFTISRDNAKNTLYLQMNSLRPEDTAVYYCVKGSTAIVGVPPTYPDEYDYWGQGTLVTVSSGGGGSGGGSEVQLVESGGGLVQPGNSLRLSCAASGFTFSSFGMSWVRQAPGKGLEWVSSISGSGSDTLYADSVKGRFTISRDNAKTTLYLQMNSLRPEDTAVYYCTIGGSLSRSSQGTLVTVSS

SEQ ID NO: 579 - protein, 251 aa, Artificial
  Nanobody sequence
EVQLVESGGGLVQPGGSLRLSCAASGFTFSDYGMSWVRQAPGKGTEWVSAISWNGNNTYYTESMKGRFTISRDNAKNTLYLQMNSLRPEDTAVYYCVKGSTAIVGVPPTYPDEYDYWGQGTLVTVSSGGGGSGGGSEVQLVESGGGLVQPGNSLRLSCAASGFTFSSFGMSWVRQAPGKGLEWVSSISGSGSDTLYADSVKGRFTISRDNAKTTLYLQMNSLRPEDTAVYYCTIGGSLSRSSQGTLVTVSS

SEQ ID NO: 580 - protein, 251 aa, Artificial
  Nanobody sequence
EVQLVESGGGLVQPGGSLRLSCAASGFTFSDYGMSWVRQAPGKGTEWVSAISWNGNNTYYTESMKGRFTISRDNAKNTLYLQMNSLRPEDTAVYYCAKGSTAIVGVPPTYPDEYDYWGQGTLVTVSSGGGGSGGGSEVQLVESGGGLVQPGNSLRLSCAASGFTFSSFGMSWVRQAPGKGLEWVSSISGSGSDTLYADSVKGRFTISRDNAKTTLYLQMNSLRPEDTAVYYCTIGGSLSRSSQGTLVTVSS

SEQ ID NO: 581 - protein, 245 aa, Artificial
  Nanobody sequence
EVQLVESGGGLVQPGNSLRLSCAASGFTFSSFGMSWVRQAPGKGLEWVSSISGSGSDTLYADSVKGRFTISRDNAKTTLYLQMNSLRPEDTAVYYCTIGGSLSRSSQGTLVTVSSGGGGSGGGSEVQLVESGGGLVQPGGSLRLSCAASGSIFKVNAMGWYRQAPGKGRELVAGIISGGSTNYADSVKGRLTISRDNAKNTVYLQMNSLRPEDTAVYYCSFVTTNSDYDLGRDYWGQGTLVTVSS

SEQ ID NO: 582 - protein, 245 aa, Artificial
  Nanobody sequence
EVQLVESGGGLVQPGNSLRLSCAASGFTFSSFGMSWVRQAPGKGLEWVSSISGSGSDTLYADSVKGRFTISRDNAKTTLYLQMNSLRPEDTAVYYCTIGGSLSRSSQGTLVTVSSGGGGSGGGSEVQLVESGGGLVQPGGSLRLSCAASGSIFKVNAMGWYRQAPGKGRELVAGIISGGSTNYADSVKGRFTISRDNAKNTVYLQMNSLRPEDTAVYYCSFVTTNSDYDLGRDYWGQGTLVTVSS

SEQ ID NO: 583 - protein, 245 aa, Artificial
  Nanobody sequence
EVQLVESGGGLVQPGNSLRLSCAASGFTFSSFGMSWVRQAPGKGLEWVSSISGSGSDTLYADSVKGRFTISRDNAKTTLYLQMNSLRPEDTAVYYCTIGGSLSRSSQGTLVTVSSGGGGSGGGSEVQLVESGGGLVQPGGSLRLSCAASGSIFKVNAMGWYRQAPGKGRELVAGIISGGSTNYADSVKGRLTISRDNAKNTLYLQMNSLRPEDTAVYYCSFVTTNSDYDLGRDYWGQGTLVTVSS

SEQ ID NO: 584 - protein, 245 aa, Artificial
  Nanobody sequence
EVQLVESGGGLVQPGNSLRLSCAASGFTFSSFGMSWVRQAPGKGLEWVSSISGSGSDTLYADSVKGRFTISRDNAKTTLYLQMNSLRPEDTAVYYCTIGGSLSRSSQGTLVTVSSGGGGSGGGSEVQLVESGGGLVQPGGSLRLSCAASGSIFKVNAMGWYRQAPGKGRELVAGIISGGSTNYADSVKGRLTISRDNAKNTVYLQMNSLRPEDTAVYYCAFVTTNSDYDLGRDYWGQGTLVTVSS

SEQ ID NO: 585 - protein, 245 aa, Artificial
  Nanobody sequence
EVQLVESGGGLVQPGNSLRLSCAASGFTFSSFGMSWVRQAPGKGLEWVSSISGSGSDTLYADSVKGRFTISRDNAKTTLYLQMNSLRPEDTAVYYCTIGGSLSRSSQGTLVTVSSGGGGSGGGSEVQLVESGGGLVQPGGSLRLSCAASGSIFKVNAMGWYRQAPGKGRELVAGIISGGSTNYADSVKGRFTISRDNAKNTLYLQMNSLRPEDTAVYYCAFVTTNSDYDLGRDYWGQGTLVTVSS

SEQ ID NO: 586 - protein, 251 aa, Artificial
  Nanobody sequence
EVQLVESGGGLVQPGNSLRLSCAASGFTFSSFGMSWVRQAPGKGLEWVSSISGSGSDTLYADSVKGRFTISRDNAKTTLYLQMNSLRPEDTAVYYCTIGGSLSRSSQGTLVTVSSGGGGSGGGSEVQLVESGGGLVQPGGSLRLSCAASGFTFDDYDIGWFRQAPGKGREGVSGISSSDGNTYYADSVKGRFTISSDNAKNTVYLQMNSLRPEDTAVYYCAAEPPDSSWYLDGSPEFFKYWGQGTLVTVSS

SEQ ID NO: 587 - protein, 251 aa, Artificial
  Nanobody sequence
EVQLVESGGGLVQPGNSLRLSCAASGFTFSSFGMSWVRQAPGKGLEWVSSISGSGSDTLYADSVKGRFTISRDNAKTTLYLQMNSLRPEDTAVYYCTIGGSLSRSSQGTLVTVSSGGGGSGGGSEVQLVESGGGLVQPGGSLRLSCAASGFTFSDYDIGWFRQAPGKGREGVSGISSSDGNTYYADSVKGRFTISSDNAKNTVYLQMNSLRPEDTAVYYCAAEPPDSSWYLDGSPEFFKYWGQGTLVTVSS

SEQ ID NO: 588 - protein, 251 aa, Artificial
  Nanobody sequence
EVQLVESGGGLVQPGNSLRLSCAASGFTFSSFGMSWVRQAPGKGLEWVSSISGSGSDTLYADSVKGRFTISRDNAKTTLYLQMNSLRPEDTAVYYCTIGGSLSRSSQGTLVTVSSGGGGSGGGSEVQLVESGGGLVQPGGSLRLSCAASGFTFDDYDIGWFRQAPGKGREGVSGISSSDGNTYYADSVKGRFTISRDNAKNTVYLQMNSLRPEDTAVYYCAAEPPDSSWYLDGSPEFFKYWGQGTLVTVSS

SEQ ID NO: 589 - protein, 251 aa, Artificial
  Nanobody sequence
EVQLVESGGGLVQPGNSLRLSCAASGFTFSSFGMSWVRQAPGKGLEWVSSISGSGSDTLYADSVKGRFTISRDNAKTTLYLQMNSLRPEDTAVYYCTIGGSLSRSSQGTLVTVSSGGGGSGGGSEVQLVESGGGLVQPGGSLRLSCAASGFTFDDYDIGWFRQAPGKGREGVSGISSSDGNTYYADSVKGRFTISSDNAKNTLYLQMNSLRPEDTAVYYCAAEPPDSSWYLDGSPEFFKYWGQGTLVTVSS

SEQ ID NO: 590 - protein, 251 aa, Artificial
  Nanobody sequence
EVQLVESGGGLVQPGNSLRLSCAASGFTFSSFGMSWVRQAPGKGLEWVSSISGSGSDTLYADSVKGRFTISRDNAKTTLYLQMNSLRPEDTAVYYCTIGGSLSRSSQGTLVTVSSGGGGSGGGSEVQLVESGGGLVQPGGSLRLSCAASGFTFSDYDIGWFRQAPGKGREGVSGISSSDGNTYYADSVKGRFTISRDNAKNTLYLQMNSLRPEDTAVYYCAAEPPDSSWYLDGSPEFFKYWGQGTLVTVSS

SEQ ID NO: 591 - protein, 251 aa, Artificial
  Nanobody sequence
EVQLVESGGGLVQPGNSLRLSCAASGFTFSSFGMSWVRQAPGKGLEWVSSISGSGSDTLYADSVKGRFTISRDNAKTTLYLQMNSLRPEDTAVYYCTIGGSLSRSSQGTLVTVSSGGGGSGGGSEVQLVESGGGLVQPGGSLRLSCAASGFTFDDYGMSWVRQAPGRATEWVSAISWNGNNTYYTESMKGRFTISRDNAKNTVYLQMNSLRPEDTAVYYCVKGSTAIVGVPPTYPDEYDYWGQGTLVTVSS

SEQ ID NO: 592 - protein, 251 aa, Artificial
  Nanobody sequence
EVQLVESGGGLVQPGNSLRLSCAASGFTFSSFGMSWVRQAPGKGLEWVSSISGSGSDTLYADSVKGRFTISRDNAKTTLYLQMNSLRPEDTAVYYCTIGGSLSRSSQGTLVTVSSGGGGSGGGSEVQLVESGGGLVQPGGSLRLSCAASGFTFDDYGMSWVRQAPGKGLEWVSAISWNGNNTYYTESMKGRFTISRDNAKNTVYLQMNSLRPEDTAVYYCVKGSTAIVGVPPTYPDEYDYWGQGTLVTVSS

SEQ ID NO: 593 - protein, 251 aa, Artificial
  Nanobody sequence
EVQLVESGGGLVQPGNSLRLSCAASGFTFSSFGMSWVRQAPGKGLEWVSSISGSGSDTLYADSVKGRFTISRDNAKTTLYLQMNSLRPEDTAVYYCTIGGSLSRSSQGTLVTVSSGGGGSGGGSEVQLVESGGGLVQPGGSLRLSCAASGFTFDDYGMSWVRQAPGRATEWVSAISWNGNNTYYTESMKGRFTISRDNAKNTLYLQMNSLRPEDTAVYYCVKGSTAIVGVPPTYPDEYDYWGQGTLVTVSS

SEQ ID NO: 594 - protein, 251 aa, Artificial
  Nanobody sequence
EVQLVESGGGLVQPGNSLRLSCAASGFTFSSFGMSWVRQAPGKGLEWVSSISGSGSDTLYADSVKGRFTISRDNAKTTLYLQMNSLRPEDTAVYYCTIGGSLSRSSQGTLVTVSSGGGGSGGGSEVQLVESGGGLVQPGGSLRLSCAASGFTFDDYGMSWVRQAPGKGLEWVSAISWNGNNTYYTESMKGRFTISRDNAKNTLYLQMNSLRPEDTAVYYCVKGSTAIVGVPPTYPDEYDYWGQGTLVTVSS

SEQ ID NO: 595 - protein, 251 aa, Artificial
  Nanobody sequence
EVQLVESGGGLVQPGNSLRLSCAASGFTFSSFGMSWVRQAPGKGLEWVSSISGSGSDTLYADSVKGRFTISRDNAKTTLYLQMNSLRPEDTAVYYCTIGGSLSRSSQGTLVTVSSGGGGSGGGSEVQLVESGGGLVQPGGSLRLSCAASGFTFDDYGMSWVRQAPGRGLEWVSAISWNGNNTYYTESMKGRFTISRDNAKNTLYLQMNSLRPEDTAVYYCVKGSTAIVGVPPTYPDEYDYWGQGTLVTVSS

SEQ ID NO: 596 - protein, 251 aa, Artificial
  Nanobody sequence
EVQLVESGGGLVQPGNSLRLSCAASGFTFSSFGMSWVRQAPGKGLEWVSSISGSGSDTLYADSVKGRFTISRDNAKTTLYLQMNSLRPEDTAVYYCTIGGSLSRSSQGTLVTVSSGGGGSGGGSEVQLVESGGGLVQPGGSLRLSCAASGFTFDDYGMSWVRQAPGRALEWVSAISWNGNNTYYTESMKGRFTISRDNAKNTLYLQMNSLRPEDTAVYYCVKGSTAIVGVPPTYPDEYDYWGQGTLVTVSS

SEQ ID NO: 597 - protein, 251 aa, Artificial
  Nanobody sequence
EVQLVESGGGLVQPGNSLRLSCAASGFTFSSFGMSWVRQAPGKGLEWVSSISGSGSDTLYADSVKGRFTISRDNAKTTLYLQMNSLRPEDTAVYYCTIGGSLSRSSQGTLVTVSSGGGGSGGGSEVQLVESGGGLVQPGGSLRLSCAASGFTFDDYGMSWVRQAPGKATEWVSAISWNGNNTYYTESMKGRFTISRDNAKNTLYLQMNSLRPEDTAVYYCVKGSTAIVGVPPTYPDEYDYWGQGTLVTVSS

SEQ ID NO: 598 - protein, 251 aa, Artificial
  Nanobody sequence
EVQLVESGGGLVQPGNSLRLSCAASGFTFSSFGMSWVRQAPGKGLEWVSSISGSGSDTLYADSVKGRFTISRDNAKTTLYLQMNSLRPEDTAVYYCTIGGSLSRSSQGTLVTVSSGGGGSGGGSEVQLVESGGGLVQPGGSLRLSCAASGFTFDDYGMSWVRQAPGKGTEWVSAISWNGNNTYYTESMKGRFTISRDNAKNTLYLQMNSLRPEDTAVYYCVKGSTAIVGVPPTYPDEYDYWGQGTLVTVSS

SEQ ID NO: 599 - protein, 251 aa, Artificial
  Nanobody sequence
EVQLVESGGGLVQPGNSLRLSCAASGFTFSSFGMSWVRQAPGKGLEWVSSISGSGSDTLYADSVKGRFTISRDNAKTTLYLQMNSLRPEDTAVYYCTIGGSLSRSSQGTLVTVSSGGGGSGGGSEVQLVESGGGLVQPGGSLRLSCAASGFTFDDYGMSWVRQAPGRGTEWVSAISWNGNNTYYTESMKGRFTISRDNAKNTLYLQMNSLRPEDTAVYYCVKGSTAIVGVPPTYPDEYDYWGQGTLVTVSS

SEQ ID NO: 600 - protein, 251 aa, Artificial
  Nanobody sequence
EVQLVESGGGLVQPGNSLRLSCAASGFTFSSFGMSWVRQAPGKGLEWVSSISGSGSDTLYADSVKGRFTISRDNAKTTLYLQMNSLRPEDTAVYYCTIGGSLSRSSQGTLVTVSSGGGGSGGGSEVQLVESGGGLVQPGGSLRLSCAASGFTFDDYGMSWVRQAPGKALEWVSAISWNGNNTYYTESMKGRFTISRDNAKNTLYLQMNSLRPEDTAVYYCVKGSTAIVGVPPTYPDEYDYWGQGTLVTVSS

SEQ ID NO: 601 - protein, 251 aa, Artificial
  Nanobody sequence
EVQLVESGGGLVQPGNSLRLSCAASGFTFSSFGMSWVRQAPGKGLEWVSSISGSGSDTLYADSVKGRFTISRDNAKTTLYLQMNSLRPEDTAVYYCTIGGSLSRSSQGTLVTVSSGGGGSGGGSEVQLVESGGGLVQPGGSLRLSCAASGFTFSDYGMSWVRQAPGKGTEWVSAISWNGNNTYYTESMKGRFTISRDNAKNTLYLQMNSLRPEDTAVYYCVKGSTAIVGVPPTYPDEYDYWGQGTLVTVSS

SEQ ID NO: 602 - protein, 251 aa, Artificial
  Nanobody sequence
EVQLVESGGGLVQPGNSLRLSCAASGFTFSSFGMSWVRQAPGKGLEWVSSISGSGSDTLYADSVKGRFTISRDNAKTTLYLQMNSLRPEDTAVYYCTIGGSLSRSSQGTLVTVSSGGGGSGGGSEVQLVESGGGLVQPGGSLRLSCAASGFTFSDYGMSWVRQAPGKGTEWVSAISWNGNNTYYTESMKGRFTISRDNAKNTLYLQMNSLRPEDTAVYYCAKGSTAIVGVPPTYPDEYDYWGQGTLVTVSS

SEQ ID NO: 603 - protein, 726 aa, Artificial
  Nanobody sequence
DAHKSEVAHRFKDLGEENFKALVLIAFAQYLQQCPFEDHVKLVNEVTEFAKTCVADESAENCDKSLHTLFGDKLCTVATLRETYGEMADCCAKQEPERNECFLQHKDDNPNLPRLVRPEVDVMCTAFHDNEETFLKKYLYEIARRHPYFYAPELLFFAKRYKAAFTECCQAADKAACLLPKLDELRDEGKASSAKQRLKCASLQKFGERAFKAWAVARLSQRFPKAEFAEVSKLVTDLTKVHTECCHGDLLECADDRADLAKYICENQDSISSKLKECCEKPLLEKSHCIAEVENDEMPADLPSLAADFVESKDVCKNYAEAKDVFLGMFLYEYARRHPDYSVVLLLRLAKTYETTLEKCCAAADPHECYAKVFDEFKPLVEEPQNLIKQNCELFEQLGEYKFQNALLVRYTKKVPQVSTPTLVEVSRNLGKVGSKCCKHPEAKRMPCAEDYLSVVLNQLCVLHEKTPVSDRVTKCCTESLVNRRPCFSALEVDETYVPKEFNAETFTFHADICTLSEKERQIKKQTALVELVKHKPKATKEQLKAVMDDFAAFVEKCCKADDKETCFAEEGKKLVAASQAALGLGGSGGSGGSGGSGGEVQLVESGGGLVQAGGSLRLSCAASGFTFDDYDIGWFRQAPGKEREGVSGISSSDGNTYYADSVKGRFTISSDNAKNTVYLQMNSLKPEDTAVYYCAAEPPDSSWYLDGSPEFFKYWGQGTQVTVSS

SEQ ID NO: 604 - protein, 712 aa, Artificial
  Nanobody sequence
EVQLVESGGGLVQAGGSLRLSCAASGFTFDDYDIGWFRQAPGKEREGVSGISSSDGNTYYADSVKGRFTISSDNAKNTVYLQMNSLKPEDTAVYYCAAEPPDSSWYLDGSPEFFKYWGQGTQVTVSSDAHKSEVAHRFKDLGEENFKALVLIAFAQYLQQCPFEDHVKLVNEVTEFAKTCVADESAENCDKSLHTLFGDKLCTVATLRETYGEMADCCAKQEPERNECFLQHKDDNPNLPRLVRPEVDVMCTAFHDNEETFLKKYLYEIARRHPYFYAPELLFFAKRYKAAFTECCQAADKAACLLPKLDELRDEGKASSAKQRLKCASLQKFGERAFKAWAVARLSQRFPKAEFAEVSKLVTDLTKVHTECCHGDLLECADDRADLAKYICENQDSISSKLKECCEKPLLEKSHCIAEVENDEMPADLPSLAADFVESKDVCKNYAEAKDVFLGMFLYEYARRHPDYSVVLLLRLAKTYETTLEKCCAAADPHECYAKVFDEFKPLVEEPQNLIKQNCELFEQLGEYKFQNALLVRYTKKVPQVSTPTLVEVSRNLGKVGSKCCKHPEAKRMPCAEDYLSVVLNQLCVLHEKTPVSDRVTKCCTESLVNRRPCFSALEVDETYVPKEFNAETFTFHADICTLSEKERQIKKQTALVELVKHKPKATKEQLKAVMDDFAAFVEKCCKADDKETCFAEEGKKLVAASQAALGL

SEQ ID NO: 605 - protein, 712 aa, Artificial
  Nanobody sequence
EVQLVESGGGLVQPGGSLRLSCAASGFTFSDYDIGWFRQAPGKGREGVSGISSSDGNTYYADSVKGRFTISRDNAKNTLYLQMNSLRPEDTAVYYCAAEPPDSSWYLDGSPEFFKYWGQGTLVTVSSDAHKSEVAHRFKDLGEENFKALVLIAFAQYLQQCPFEDHVKLVNEVTEFAKTCVADESAENCDKSLHTLFGDKLCTVATLRETYGEMADCCAKQEPERNECFLQHKDDNPNLPRLVRPEVDVMCTAFHDNEETFLKKYLYEIARRHPYFYAPELLFFAKRYKAAFTECCQAADKAACLLPKLDELRDEGKASSAKQRLKCASLQKFGERAFKAWAVARLSQRFPKAEFAEVSKLVTDLTKVHTECCHGDLLECADDRADLAKYICENQDSISSKLKECCEKPLLEKSHCIAEVENDEMPADLPSLAADFVESKDVCKNYAEAKDVFLGMFLYEYARRHPDYSVVLLLRLAKTYETTLEKCCAAADPHECYAKVFDEFKPLVEEPQNLIKQNCELFEQLGEYKFQNALLVRYTKKVPQVSTPTLVEVSRNLGKVGSKCCKHPEAKRMPCAEDYLSVVLNQLCVLHEKTPVSDRVTKCCTESLVNRRPCFSALEVDETYVPKEFNAETFTFHADICTLSEKERQIKKQTALVELVKHKPKATKEQLKAVMDDFAAFVEKCCKADDKETCFAEEGKKLVAASQAALGL

SEQ ID NO: 606 - protein, 848 aa, Artificial
  Nanobody sequence
EVQLVESGGGLVQPGGSLRLSCAASGFTFSDYDIGWFRQAPGKGREGVSGISSSDGNTYYADSVKGRFTISRDNAKNTLYLQMNSLRPEDTAVYYCAAEPPDSSWYLDGSPEFFKYWGQGTLVTVSSGGGGSGGGSEVQLVESGGGLVQPGGSLRLSCAASGFTFSDYDIGWFRQAPGKGREGVSGISSSDGNTYYADSVKGRFTISRDNAKNTLYLQMNSLRPEDTAVYYCAAEPPDSSWYLDGSPEFFKYWGQGTLVTVSSDAHKSEVAHRFKDLGEENFKALVLIAFAQYLQQCPFEDHVKLVNEVTEFAKTCVADESAENCDKSLHTLFGDKLCTVATLRETYGEMADCCAKQEPERNECFLQHKDDNPNLPRLVRPEVDVMCTAFHDNEETFLKKYLYEIARRHPYFYAPELLFFAKRYKAAFTECCQAADKAACLLPKLDELRDEGKASSAKQRLKCASLQKFGERAFKAWAVARLSQRFPKAEFAEVSKLVTDLTKVHTECCHGDLLECADDRADLAKYICENQDSISSKLKECCEKPLLEKSHCIAEVENDEMPADLPSLAADFVESKDVCKNYAEAKDVFLGMFLYEYARRHPDYSVVLLLRLAKTYETTLEKCCAAADPHECYAKVFDEFKPLVEEPQNLIKQNCELFEQLGEYKFQNALLVRYTKKVPQVSTPTLVEVSRNLGKVGSKCCKHPEAKRMPCAEDYLSVVLNQLCVLHEKTPVSDRVTKCCTESLVNRRPCFSALEVDETYVPKEFNAETFTFHADICTLSEKERQIKKQTALVELVKHKPKATKEQLKAVMDDFAAFVEKCCKADDKETCFAEEGKKLVAASQAALGL

SEQ ID NO: 607 - protein, 850 aa, Artificial
  Nanobody sequence
EVQLVESGGGLVQPGGSLRLSCAASGFTFSDYDIGWFRQAPGKGREGVSGISSSDGNTYYADSVKGRFTISRDNAKNTLYLQMNSLRPEDTAVYYCAAEPPDSSWYLDGSPEFFKYWGQGTLVTVSSGGGGSGGGGSGGGGSGGGGSEVQLVESGGGLVQPGGSLRLSCAASGFTFSDYDIGWFRQAPGKGREGVSGISSSDGNTYYADSVKGRFTISRDNAKNTLYLQMNSLRPEDTAVYYCAAEPPDSSWYLDGSPEFFKYWGQGTLVTVSSDAHKSEVAHRFKDLGEENFKALVLIAFAQYLQQCPFEDHVKLVNEVTEFAKTCVADESAENCDKSLHTLFGDKLCTVATLRETYGEMADCCAKQEPERNECFLQHKDDNPNLPRLVRPEVDVMCTAFHDNEETFLKKYLYEIARRHPYFYAPELLFFAKRYKAAFTECCQAADKAACLLPKLDELRDEGKASSAKQRLKCASLQKFGERAFKAWAVARLSQRFPKAEFAEVSKLVTDLTKVHTECCHGDLLECADDRADLAKYICENQDSISSKLKECCEKPLLEKSHCIAEVENDEMPADLPSLAADFVESKDVCKNYAEAKDVFLGMFLYEYARRHPDYSVVLLLRLAKTYETTLEKCCAAADPHECYAKVFDEFKPLVEEPQNLIKQNCELFEQLGEYKFQNALLVRYTKKVPQVSTPTLVEVSRNLGKVGSKCCKHPEAKRMPCAEDYLSVVLNQLCVLHEKTPVSDRVTKCCTESLVNRRPCFSALEVDETYVPKEFNAETFTFHADICTLSEKERQIKKQTALVELVKHKPKATKEQLKAVMDDFAAFVEKCCKADDKETCFAEEGKKLV

SEQ ID NO: 608 - protein, 842 aa, Artificial
  Nanobody sequence
EVQLVESGGGLVQPGGSLRLSCAASGFTFSDYDIGWFRQAPGKGREGVSGISSSDGNTYYADSVKGRFTISRDNAKNTLYLQMNSLRPEDTAVYYCAAEPPDSSWYLDGSPEFFKYWGQGTLVTVSSAAAEVQLVESGGGLVQPGGSLRLSCAASGFTFSDYDIGWFRQAPGKGREGVSGISSSDGNTYYADSVKGRFTISRDNAKNTLYLQMNSLRPEDTAVYYCAAEPPDSSWYLDGSPEFFKYWGQGTLVTVSSDAHKSEVAHRFKDLGEENFKALVLIAFAQYLQQCPFEDHVKLVNEVTEFAKTCVADESAENCDKSLHTLFGDKLCTVATLRETYGEMADCCAKQEPERNECFLQHKDDNPNLPRLVRPEVDVMCTAFHDNEETFLKKYLYEIARRHPYFYAPELLFFAKRYKAAFTECCQAADKAACLLPKLDELRDEGKASSAKQRLKCASLQKFGERAFKAWAVARLSQRFPKAEFAEVSKLVTDLTKVHTECCHGDLLECADDRADLAKYICENQDSISSKLKECCEKPLLEKSHCIAEVENDEMPADLPSLAADFVESKDVCKNYAEAKDVFLGMFLYEYARRHPDYSVVLLLRLAKTYETTLEKCCAAADPHECYAKVFDEFKPLVEEPQNLIKQNCELFEQLGEYKFQNALLVRYTKKVPQVSTPTLVEVSRNLGKVGSKCCKHPEAKRMPCAEDYLSVVLNQLCVLHEKTPVSDRVTKCCTESLVNRRPCFSALEVDETYVPKEFNAETFTFHADICTLSEKERQIKKQTALVELVKHKPKATKEQLKAVMDDFAAFVEKCCKADDKETCFAEEGKKLVAASQAALGL

SEQ ID NO: 609 - protein, 121 aa, Artificial
  CDR, FR or Nanobody sequence
EVQLVESGGGLVQPGGSLRLSCAASGSIFKVNAMGWYRQAPGKGRELVAGIISGGSTNYADSVKGRLTISRDNAKNTVYLQMNSLRPEDTAVYYCSFVTTNSDYDLGRDYWGQGTLVTVSS

SEQ ID NO: 610 - protein, 121 aa, Artificial
  CDR, FR or Nanobody sequence
EVQLVESGGGLVQPGGSLRLSCAASGSIFKVNAMGWYRQAPGKGRELVAGIISGGSTNYADSVKGRFTISRDNAKNTVYLQMNSLRPEDTAVYYCSFVTTNSDYDLGRDYWGQGTLVTVSS

SEQ ID NO: 611 - protein, 121 aa, Artificial
  CDR, FR or Nanobody sequence
EVQLVESGGGLVQPGGSLRLSCAASGSIFKVNAMGWYRQAPGKGRELVAGIISGGSTNYADSVKGRLTISRDNAKNTLYLQMNSLRPEDTAVYYCSFVTTNSDYDLGRDYWGQGTLVTVSS

SEQ ID NO: 612 - protein, 121 aa, Artificial
  CDR, FR or Nanobody sequence
EVQLVESGGGLVQPGGSLRLSCAASGSIFKVNAMGWYRQAPGKGRELVAGIISGGSTNYADSVKGRLTISRDNAKNTVYLQMNSLRPEDTAVYYCAFVTTNSDYDLGRDYWGQGTLVTVSS

SEQ ID NO: 613 - protein, 121 aa, Artificial
  CDR, FR or Nanobody sequence
EVQLVESGGGLVQPGGSLRLSCAASGSIFKVNAMGWYRQAPGKGRELVAGIISGGSTNYADSVKGRFTISRDNAKNTLYLQMNSLRPEDTAVYYCAFVTTNSDYDLGRDYWGQGTLVTVSS

SEQ ID NO: 614 - protein, 127 aa, Artificial
  CDR, FR or Nanobody sequence
EVQLVESGGGLVQPGGSLRLSCAASGFTFDDYDIGWFRQAPGKGREGVSGISSSDGNTYYADSVKGRFTISSDNAKNTVYLQMNSLRPEDTAVYYCAAEPPDSSWYLDGSPEFFKYWGQGTLVTVSS

SEQ ID NO: 615 - protein, 127 aa, Artificial
  CDR, FR or Nanobody sequence
EVQLVESGGGLVQPGGSLRLSCAASGFTFSDYDIGWFRQAPGKGREGVSGISSSDGNTYYADSVKGRFTISSDNAKNTVYLQMNSLRPEDTAVYYCAAEPPDSSWYLDGSPEFFKYWGQGTLVTVSS

SEQ ID NO: 616 - protein, 127 aa, Artificial
  CDR, FR or Nanobody sequence
EVQLVESGGGLVQPGGSLRLSCAASGFTFDDYDIGWFRQAPGKGREGVSGISSSDGNTYYADSVKGRFTISRDNAKNTVYLQMNSLRPEDTAVYYCAAEPPDSSWYLDGSPEFFKYWGQGTLVTVSS

SEQ ID NO: 617 - protein, 127 aa, Artificial
  CDR, FR or Nanobody sequence
EVQLVESGGGLVQPGGSLRLSCAASGFTFDDYDIGWFRQAPGKGREGVSGISSSDGNTYYADSVKGRFTISSDNAKNTLYLQMNSLRPEDTAVYYCAAEPPDSSWYLDGSPEFFKYWGQGTLVTVSS

SEQ ID NO: 618 - protein, 127 aa, Artificial
  CDR, FR or Nanobody sequence
EVQLVESGGGLVQPGGSLRLSCAASGFTFSDYDIGWFRQAPGKGREGVSGISSSDGNTYYADSVKGRFTISRDNAKNTLYLQMNSLRPEDTAVYYCAAEPPDSSWYLDGSPEFFKYWGQGTLVTVSS

SEQ ID NO: 619 - protein, 127 aa, Artificial
  CDR, FR or Nanobody sequence
EVQLVESGGGLVQPGGSLRLSCAASGFTFDDYGMSWVRQAPGRATEWVSAISWNGNNTYYTESMKGRFTISRDNAKNTVYLQMNSLRPEDTAVYYCVKGSTAIVGVPPTYPDEYDYWGQGTLVTVSS

SEQ ID NO: 620 - protein, 127 aa, Artificial
  CDR, FR or Nanobody sequence
EVQLVESGGGLVQPGGSLRLSCAASGFTFDDYGMSWVRQAPGKGLEWVSAISWNGNNTYYTESMKGRFTISRDNAKNTVYLQMNSLRPEDTAVYYCVKGSTAIVGVPPTYPDEYDYWGQGTLVTVSS

SEQ ID NO: 621 - protein, 127 aa, Artificial
  CDR, FR or Nanobody sequence
EVQLVESGGGLVQPGGSLRLSCAASGFTFDDYGMSWVRQAPGRATEWVSAISWNGNNTYYTESMKGRFTISRDNAKNTLYLQMNSLRPEDTAVYYCVKGSTAIVGVPPTYPDEYDYWGQGTLVTVSS

SEQ ID NO: 622 - protein, 127 aa, Artificial
  CDR, FR or Nanobody sequence
EVQLVESGGGLVQPGGSLRLSCAASGFTFDDYGMSWVRQAPGKGLEWVSAISWNGNNTYYTESMKGRFTISRDNAKNTLYLQMNSLRPEDTAVYYCVKGSTAIVGVPPTYPDEYDYWGQGTLVTVSS

SEQ ID NO: 623 - protein, 127 aa, Artificial
  CDR, FR or Nanobody sequence
EVQLVESGGGLVQPGGSLRLSCAASGFTFDDYGMSWVRQAPGRGLEWVSAISWNGNNTYYTESMKGRFTISRDNAKNTLYLQMNSLRPEDTAVYYCVKGSTAIVGVPPTYPDEYDYWGQGTLVTVSS

SEQ ID NO: 624 - protein, 127 aa, Artificial
  CDR, FR or Nanobody sequence
EVQLVESGGGLVQPGGSLRLSCAASGFTFDDYGMSWVRQAPGRALEWVSAISWNGNNTYYTESMKGRFTISRDNAKNTLYLQMNSLRPEDTAVYYCVKGSTAIVGVPPTYPDEYDYWGQGTLVTVSS

SEQ ID NO: 625 - protein, 127 aa, Artificial
  CDR, FR or Nanobody sequence
EVQLVESGGGLVQPGGSLRLSCAASGFTFDDYGMSWVRQAPGKATEWVSAISWNGNNTYYTESMKGRFTISRDNAKNTLYLQMNSLRPEDTAVYYCVKGSTAIVGVPPTYPDEYDYWGQGTLVTVSS

SEQ ID NO: 626 - protein, 127 aa, Artificial
  CDR, FR or Nanobody sequence
EVQLVESGGGLVQPGGSLRLSCAASGFTFDDYGMSWVRQAPGKGTEWVSAISWNGNNTYYTESMKGRFTISRDNAKNTLYLQMNSLRPEDTAVYYCVKGSTAIVGVPPTYPDEYDYWGQGTLVTVSS

SEQ ID NO: 627 - protein, 127 aa, Artificial
  CDR, FR or Nanobody sequence
EVQLVESGGGLVQPGGSLRLSCAASGFTFDDYGMSWVRQAPGRGTEWVSAISWNGNNTYYTESMKGRFTISRDNAKNTLYLQMNSLRPEDTAVYYCVKGSTAIVGVPPTYPDEYDYWGQGTLVTVSS

SEQ ID NO: 628 - protein, 127 aa, Artificial
  CDR, FR or Nanobody sequence
EVQLVESGGGLVQPGGSLRLSCAASGFTFDDYGMSWVRQAPGKALEWVSAISWNGNNTYYTESMKGRFTISRDNAKNTLYLQMNSLRPEDTAVYYCVKGSTAIVGVPPTYPDEYDYWGQGTLVTVSS

SEQ ID NO: 629 - protein, 449 aa, Artificial
  Reference IgG heavy chain
QVQLQESGPGLVRPSQTLSLTCTVSGYSITSDHAWSWVRQPPGRGLEWIGYISYSGITTYNPSLKSRVTMLRDTSKNQFSLRLSSVTAADTAVYYCARSLARTTAMDYWGQGSLVTVSSASTKGPSVFPLAPSSKSTSGGTAALGCLVKDYFPEPVTVSWNSGALTSGVHTFPAVLQSSGLYSLSSVVTVPSSSLGTQTYICNVNHKPSNTKVDKKVEPKSCDKTHTCPPCPAPELLGGPSVFLFPPKPKDTLMISRTPEVTCVVVDVSHEDPEVKFNWYVDGVEVHNAKTKPREEQYNSTYRVVSVLTVLHQDWLNGKEYKCKVSNKALPAPIEKTISKAKGQPREPQVYTLPPSRDELTKNQVSLTCLVKGFYPSDIAVEWESNGQPENNYKTTPPVLDSDGSFFLYSKLTVDKSRWQQGNVFSCSVMHEALHNHYTQKSLSLSPGK

SEQ ID NO: 630 - protein, 214 aa, Artificial [sequence omitted]

SEQ ID NO: 631 - protein, 222 aa, Artificial
  Reference Fab heavy chain
QVQLQESGPGLVRPSQTLSLTCTVSGYSITSDHAWSWVRQPPGRGLEWIGYISYSGITTYNPSLKSRVTMLRDTSKNQFSLRLSSVTAADTAVYYCARSLARTTAMDYWGQGSLVTVSSASTKGPSVFPLAPSSKSTSGGTAALGCLVKDYFPEPVTVSWNSGALTSGVHTFPAVLQSSGLYSLSSVVTVPSSSLGTQTYICNVNHKPSNTKVDKKVEPKSC

SEQ ID NO: 632 - protein, 214 aa, Artificial [sequence omitted]

SEQ ID NO: 633 - protein, 339 aa, Artificial
  IL6R sequence macaca fascicularis
LAPGGCPAQEVARGVLTSLPGDSVTLTCPGGEPEDNATVHWVLRKPAEGSHLSRWAGVGRRLLLRSVQLHDSGNYSCYRAGRPAATVHLLVDVPPEEPQLSCFRKSPLSNVVCEWGPRSTPSPTTKAVLLVRKFQNSPAEDFQEPCQYSQESQKFSCQLAVPEGDSSFYIVSMCVASSVGSKLSKTQTFQGCGILQPDPPANITVTAVARNPRWLSVTWQDPHSWNSSFYRLRFELRYRAERSKTFTTWMVKDLQHHCVIHDAWSGLRHVVQLRAQEEFGQGEWSEWSPEAMGTPWTESRSPPAENEVSTPTQAPTTNKDDDNILSGDSANATSLPVQD

1. An isolated amino acid sequence that is directed against and/or that can specifically bind to IL-6R.

2. The isolated amino acid sequence according to claim 1, wherein said amino acid sequence binds to an epitope of IL-6R, such that the interaction between IL-6R and IL-6 is modulated or such that the interaction between the IL-6/IL-6R complex and gp130 is modulated.

3. The isolated amino acid sequence according to claim 2, wherein said amino acid sequence competes with IL-6 for binding to said epitope of IL-6R or wherein said amino acid sequence competes with gp130 for binding to said epitope of IL-6R.

4. The isolated amino acid sequence according to claim 2, wherein said epitope is located in an extracellular domain of IL-6R.

5. The isolated amino acid sequence according to claim 4, wherein said epitope is located in the extracellular D3 domain of IL-6R.

6. The isolated amino acid sequence according to claim 4, wherein said epitope comprises at least a fragment of the 18 contact residue stretch of the extracellular D3 domain of IL-6R, which is involved in the interaction between IL-6 and IL-6R.

7. The isolated amino acid sequence according to claim 4, wherein said epitope comprises amino acid residue Phe229 and/or amino acid residue Phe279 of the extracellular D3 domain of IL-6R.

8-11. (canceled)

12. The isolated amino acid sequence according to claim 1, that can specifically bind to IL-6R with a dissociation constant (K_{D}) of 10⁻⁵ to 10⁻¹² moles/liter or less, and preferably 10⁻⁷ to 10⁻¹² moles/liter or less and more preferably 10⁻⁸ to 10⁻¹² moles/liter.

13. The isolated amino acid sequence according to claim 1, that can specifically bind to IL-6R with a rate of association (kₒₙ-rate) of between 10² M¹s⁻¹ to about 10⁷ M⁻¹s⁻¹, preferably between 10³ M⁻¹s⁻¹ and 10⁷ M⁻¹s⁻¹, more preferably between 10⁴ M⁻¹s⁻¹ and 10⁷ M⁻¹s⁻¹, such as between 10⁵ M⁻¹s⁻¹ and 10⁷ M⁻¹s⁻¹.

14. The isolated amino acid sequence according to claim 1, that can specifically bind to IL-6R with a rate of dissociation (k_{off} rate) between 1 s⁻¹ and 10⁻⁶ s⁻¹ preferably between 10⁻² s⁻¹ and 10⁻⁶ s⁻¹, more preferably between 10⁻³ s⁻¹ and 10⁻⁶ s⁻¹, such as between 10⁻⁴ s⁻¹ and 10⁻⁶ s⁻¹.

15. The isolated amino acid sequence according to claim 1 any of the preceding claims, that can specifically bind to IL-6R with an affinity less than 500 nM, preferably less than 200 nM, more preferably less than 10 nM, such as less than 500 pM.

16. (canceled)

17. The isolated amino acid sequence according to claim 1 any of the preceding claims, that comprises an immunoglobulin fold or that under suitable conditions is capable of forming an immunoglobulin fold.

18-21. (canceled)

22. The isolated amino acid sequence according to claim 1, that essentially consists of a light chain variable domain sequence (e.g. a V_{L}-sequence); or of a heavy chain variable domain sequence (e.g. a V_{H}-sequence).

23. The isolated amino acid sequence according to claim 1, that essentially consists of a of a heavy chain variable domain sequence that is derived from a conventional four-chain antibody or that essentially consist of a heavy chain variable domain sequence that is derived from heavy chain antibody.

24. The isolated amino acid sequence according to claim 1, that essentially consists of a domain antibody (or an amino acid sequence that is suitable for use as a domain antibody), of a single domain antibody (or an amino acid sequence that is suitable for use as a single domain antibody), of a “dAb” (or an amino acid sequence that is suitable for use as a dAb) or of a Nanobody® (including but not limited to a V_{HH} sequence).

25. (canceled)

26. The isolated amino acid sequence according to claim 1, that essentially consists of a Nanobody® that
a) has 80% amino acid identity with at least one of the amino acid sequences of SEQ ID NO's: 399 to 471, in which for the purposes of determining the degree of amino acid identity, the amino acid residues that form the CDR sequences are disregarded;
and in which:
b) preferably one or more of the amino acid residues at positions 11, 37, 44, 45, 47, 83, 84, 103, 104 and 108 according to the Kabat numbering are chosen from the Hallmark residues mentioned in Table A-3.

27. The isolated amino acid sequence according to claim 1, that essentially consists of a humanized Nanobody®.

28. (canceled)

29. An isolated amino acid sequence directed against IL-6R, that comprises one or more stretches of amino acid residues chosen from the group consisting of:
a) the amino acid sequences of SEQ ID NO's: 93 to 143;
b) amino acid sequences that have at least 80% amino acid identity with at least one of the amino acid sequences of SEQ ID NO's: 93 to 143;
c) amino acid sequences that have 3, 2, or 1 amino acid difference with at least one of the amino acid sequences of SEQ ID NO's: 93 to 143;
d) the amino acid sequences of SEQ ID NO's: 195 to 245;
e) amino acid sequences that have at least 80% amino acid identity with at least one of the amino acid sequences of SEQ ID NO's: 195 to 245;
f) amino acid sequences that have 3, 2, or 1 amino acid difference with at least one of the amino acid sequences of SEQ ID NO's: 195 to 245;
g) the amino acid sequences of SEQ ID NO's: 297 to 347;
h) amino acid sequences that have at least 80% amino acid identity with at least one of the amino acid sequences of SEQ ID NO's: 297 to 347;
i) amino acid sequences that have 3, 2, or 1 amino acid difference with at least one of the amino acid sequences of SEQ ID NO's: 297 to 347;
or any suitable combination thereof.

30-50. (canceled)

51. Amino acid sequence according to claim 29, that essentially consists of a Nanobody® that
a) has 80% amino acid identity with at least one of the amino acid sequences of SEQ ID NO's: 399 to 471, in which for the purposes of determining the degree of amino acid identity, the amino acid residues that form the CDR sequences are disregarded;
and in which:
b) preferably one or more of the amino acid residues at positions 11, 37, 44, 45, 47, 83, 84, 103, 104 and 108 according to the Kabat numbering are chosen from the Hallmark residues mentioned in Table A-3.

52. Amino acid sequence according to claim 29, that essentially consists of a humanized Nanobody®.

53. (canceled)

54. Amino acid sequence that essentially consists of 4 framework regions (FR1 to FR4, respectively) and 3 complementarity determining regions (CDR1 to CDR3, respectively), in which:
CDR1 is chosen from the group consisting of:
a) the amino acid sequences of SEQ ID NO's: 93 to 143;
b) amino acid sequences that have at least 80% amino acid identity with at least one of the amino acid sequences of SEQ ID NO's: 93 to 143;
c) amino acid sequences that have 3, 2, or 1 amino acid difference with at least one of the amino acid sequences of SEQ ID NO's: 93 to 143;
and/or
CDR2 is chosen from the group consisting of:
d) the amino acid sequences of SEQ ID NO's: 195 to 245;
e) amino acid sequences that have at least 80% amino acid identity with at least one of the amino acid sequences of SEQ ID NO's: 195 to 245;
f) amino acid sequences that have 3, 2, or 1 amino acid difference with at least one of the amino acid sequences of SEQ ID NO's: 195 to 245;
and/or
CDR3 is chosen from the group consisting of:
g) the amino acid sequences of SEQ ID NO's: 297 to 347;
h) amino acid sequences that have at least 80% amino acid identity with at least one of the amino acid sequences of SEQ ID NO's: 297 to 347;
i) amino acid sequences that have 3, 2, or 1 amino acid difference with at least one of the amino acid sequences of SEQ ID NO's: 297 to 347.

55-71. (canceled)

72. Amino acid sequence according to claim 54, that essentially consists of a Nanobody® that
a) has 80% amino acid identity with at least one of the amino acid sequences of SEQ ID NO's: 399 to 471, in which for the purposes of determining the degree of amino acid identity, the amino acid residues that form the CDR sequences are disregarded;
and in which:
b) preferably one or more of the amino acid residues at positions 11, 37, 44, 45, 47, 83, 84, 103, 104 and 108 according to the Kabat numbering are chosen from the Hallmark residues mentioned in Table A-3.

73-99. (canceled)

100. Compound or construct, that comprises or essentially consists of one or more amino acid sequences according to claim 1, and optionally further comprises one or more other groups, residues, moieties or binding units, optionally linked via one or more linkers.

101-107. (canceled)

108. Compound or construct according to claim 100, which is a multivalent construct.

109. Compound or construct according to claim 100, which is a multispecific construct.

110. Compound or construct according to claim 100, which has an increased half-life, compared to the corresponding amino acid sequence.

111. Compound or construct according to claim 100, in which said one or more other groups, residues, moieties or binding units provide the compound or construct with increased half-life, compared to the corresponding amino acid sequence.

112. Compound or construct according to claim 111, in which said one or more other groups, residues, moieties or binding units that provide the compound or construct with increased half-life is chosen from the group consisting of serum proteins or fragments thereof, binding units that can bind to serum proteins, an Fc portion, and small proteins or peptides that can bind to serum proteins.

113. Compound or construct according to claim 111, in which said one or more other groups, residues, moieties or binding units that provide the compound or construct with increased half-life is chosen from the group consisting of human serum albumin or fragments thereof.

114. Compound or construct according to claim 111, in which said one or more other groups, residues, moieties or binding units that provide the compound or construct with increased half-life are chosen from the group consisting of binding units that can bind to serum albumin (such as human serum albumin) or a serum immunoglobulin (such as IgG).

115. Compound or construct according to claim 114, in which said one or more other groups, residues, moieties or binding units that provide the compound or construct with increased half-life are chosen from the group consisting of domain antibodies, amino acid sequences that are suitable for use as a domain antibody, single domain antibodies, amino acid sequences that are suitable for use as a single domain antibody, “dAb”'s, amino acid sequences that are suitable for use as a dAb, or Nanobodies that can bind to serum albumin (such as human serum albumin) or a serum immunoglobulin (such as IgG).

116. Compound or construct according to claim 115, in which said one or more other groups, residues, moieties or binding units that provide the compound or construct with increased half-life is Nanobody that can bind to serum albumin (such as human serum albumin) or a serum immunoglobulin (such as IgG).

117. Compound or construct according to claim 111, that has a serum half-life that is at least 1.5 times, preferably at least 2 times, such as at least 5 times, for example at least 10 times or more than 20 times, greater than the half-life of the corresponding amino acid sequence.

118. Compound or construct according to claim 100, that has a serum half-life that is increased with more than 1 hours, preferably more than 2 hours, more preferably more than 6 hours, such as more than 12 hours, or even more than 24, 48 or 72 hours, compared to the corresponding amino acid sequence.

119. Compound or construct according to claim 100, that has a serum half-life in human of at least about 12 hours, preferably at least 24 hours, more preferably at least 48 hours, even more preferably at least 72 hours or more. For example, compounds or polypeptides of the invention may have a half-life of at least 5 days (such as about 5 to 10 days), at preferably at least 9 days (such as about 9 to 14 days), more preferably at least about 10 days (such as about 10 to 15 days), or at least about 11 days (such as about 11 to 16 days), more preferably at least about 12 days (such as about 12 to 18 days or more), or more than 14 days (such as about 14 to 19 days).

120. Monovalent construct, comprising or essentially consisting of one amino acid sequence according to claim 1.

121. Monovalent construct according to claim 120, in which said amino acid sequence of the invention is chosen from the group consisting of domain antibodies, amino acid sequences that are suitable for use as a domain antibody, single domain antibodies, amino acid sequences that are suitable for use as a single domain antibody, “dAb”'s, amino acid sequences that are suitable for use as a dAb, or Nanobodies.

122. (canceled)

123. Nucleic acid or nucleotide sequence, that encodes the amino acid sequence according to claim 1.

124-125. (canceled)

126. Method for producing an amino acid sequence comprising the steps of:
a) expressing, in a suitable host cell or host organism or in another suitable expression system, a nucleic acid or nucleotide sequence according to claim 123;
optionally followed by:
b) isolating and/or purifying the amino acid sequence.

127. (canceled)

128. Composition, comprising at least one amino acid sequence according to claim 1.

129-130. (canceled)

131. Method for the prevention and/or treatment of at least one of the diseases and disorders associated with IL-6R and/or with the IL-6/IL-6R complex and/or with the signalling pathways and/or the biological functions and responses in which IL-6 and/or the IL-6/IL-6R complex are involved, said method comprising administering, to a subject in need thereof, a pharmaceutically active amount of at least one amino acid sequence according to claim 1.

132-136. (canceled)

137. Method for immunotherapy, said method comprising administering, to a subject in need thereof, a pharmaceutically active amount of at least one amino acid sequence according to claim 1.

138-191. (canceled)
